(19) United States
(12) Patent Application Publication
(10) Pub. No.: US 2011/0189183 A1
(43) Pub. Date: Aug. 4, 2011

(54) Antibodies against candida, collections thereof and methods of use

(76) Inventors: Robert Anthony Williamson, La Jolla, CA (US); Jehangir Wadia, San Diego, CA (US); Michelle Wagner, San Diego, CA (US)

(21) Appl. No.: 12/807,955

(22) Filed: Sep. 17, 2010

Related U.S. Application Data
(60) Provisional application No. 61/277,091, filed on Sep. 18, 2009.
(60) Provisional application No. 61/341,175, filed on Mar. 25, 2010.

(51) Int. Cl. A61K 39/395; C12N 15/63; C07K 16/14; C07H 21/00; C12N 1/00; C12N 5/10; A61P 31/10

(52) U.S. Cl. 424/135.1; 435/320.1; 530/389.1; 530/387.3; 530/391.1; 424/172.1; 424/133.1; 536/23.53; 435/243; 435/419; 435/325

(57) ABSTRACT

Provided herein are antibodies that immunospecifically bind to species of the genus Candida. Also provided are methods for of prevention, treatment and diagnosis of Candida infection and/or the treatment of one more symptoms of Candida infection. Methods of generating antibodies that immunospecifically bind Candida also are provided.

### RELATED APPLICATIONS

[0001] Benefit of priority is claimed to U.S. Provisional Application Ser. No. 61/277,091, entitled “ANTIBODIES AGAINST CANDIDA AND METHODS OF USE,” filed on Sep. 18, 2009, and to U.S. Provisional Application Ser. No. 61/341,175, entitled “ANTIBODIES AGAINST CANDIDA, COLLECTIONS THEREOF AND METHODS OF USE,” filed on Mar. 25, 2010.

[0002] This application is related to corresponding International Application No. [Attorney Docket No. 3800013-00029/1157PC], filed the same day herewith, entitled “ANTIBODIES AGAINST CANDIDA, COLLECTIONS THEREOF AND METHODS OF USE,” which also claims priority to U.S. Provisional Application Ser. Nos. 61/277,091 and 61/341,175.

[0003] This application is related to U.S. application Ser. No. 12/586,273, entitled “METHODS FOR CREATING DIVERSITY IN LIBRARIES AND LIBRARIES, DISPLAY VECTORS AND METHODS, AND DISPLAYED MOLECULES,” filed Sep. 18, 2009, and to U.S. application Ser. No. 12/586,307, entitled “METHODS AND VECTORS FOR DISPLAY OF MOLECULES AND DISPLAYED MOLECULES AND COLLECTIONS,” filed Sep. 18, 2009.

[0004] This application is related to U.S. Provisional Application Ser. No. 61/192,916, entitled “METHODS FOR CREATING DIVERSITY IN LIBRARIES AND LIBRARIES, DISPLAY VECTORS AND METHODS, AND DISPLAYED MOLECULES,” filed Sep. 22, 2008, and to U.S. Provisional Application Ser. No. 61/192,960, entitled “VECTORS FOR EXPRESSION OF DISPLAYED PROTEINS,” filed Sep. 22, 2008, and to U.S. Application Ser. No. 61/192,982, entitled “METHODS AND VECTORS FOR DISPLAY OF MOLECULES AND DISPLAYED MOLECULES AND COLLECTIONS,” filed Sep. 22, 2008.

[0005] The subject matter of each of the above-referenced applications is incorporated by reference in its entirety.

### INCORPORATION BY REFERENCE OF SEQUENCE LISTING PROVIDED ON COMPACT DISCS

[0006] An electronic version on compact disc (CD-R) of the Sequence Listing is filed herewith in duplicate (labeled Copy # 1 and Copy # 2), the contents of which are incorporated by reference in their entirety. The computer-readable file on each of the aforementioned compact discs, created on Sep. 17, 2010, is identical, 991 kilobytes in size, and titled 1157seq.001.txt.

### FIELD OF INVENTION

[0007] Provided are domain-exchanged antibodies that immunospecifically bind to Candida species, including Candida albicans. Also provided are diagnostic and therapeutic methods that employ anti-Candida antibodies. The therapeutic methods include administering the anti-Candida antibodies provided for the prevention or treatment of a Candida infection and/or amelioration of one or more symptoms of a Candida infection, such as infections in immunocompromised patients or patients receiving large quantities of antibiotics. Combinations of a plurality of different anti-Candida antibodies provided herein and/or with other anti-fungal antibodies or anti-fungal agents can be used for combination therapy. Compositions containing the mixtures of anti-Candida antibodies also are provided.

### BACKGROUND

[0008] Members of the genus Candida are responsible for a wide variety of opportunistic infections in humans. In normal hosts, Candida infections, such as those caused by Candida albicans, can range from mild (e.g. thrush in newborn infants and paronychia) to more severe, chronic infections (e.g. Candida vaginitis). Vaginitis is particularly frequent in otherwise normal females with diabetes or a history of prolonged antibiotic or oral contraceptive use. While short-term topical therapy is effective in treating individual episodes of vaginitis, such agents do not prevent recurrences. Thus, even in the normal host, infection with C. albicans can occur at epithelial surfaces, and recurrences are not prevented by presently available therapies. In immunocompromised hosts such as cancer patients, transplant patients, post-operative surgical patients and premature newborns, C. albicans is the leading fungal pathogen. In T cell compromised patients, Candida infection can cause disease ranging from aggressive local infections such as periodontitis, oral ulceration, or esophagitis to complex and potentially lethal infections of the bloodstream with subsequent dissemination to brain, eye, heart, liver, spleen, kidneys, or bone. Such grave prognoses require more toxic therapy, with attendant consequences from both the underlying infection and the treatment. The infection typically begins at an epithelial site, evades local defenses, and invades the bloodstream in the face of immunosuppression. Hence, there exists a need for the development of effective therapies to prevent and treat infections caused by Candida species.

### SUMMARY

[0009] Provided herein are anti-Candida antibodies for the prophylaxis or treatment of Candida infection and Candida-mediated diseases or conditions. Also provided herein are anti-Candida antibodies for the diagnosis and/or monitoring of Candida infection. Provided herein are anti-Candida antibodies that immunospecifically bind to Candida.

[0010] Provided herein are anti-Candida antibodies that are domain-exchanged antibodies. The anti-Candida antibodies provided herein are domain-exchanged antibodies that bind to an epitope presented on a Candida cell wall or surface with an affinity of equal to or less than or about 100 nM, where the antibody is not 2G12. For example, the antibodies provided herein do not have a sequence of amino acids for a variable heavy chain set forth as amino acids 4-120 of SEQ ID NO:154 and a variable light chain comprising a sequence of amino acids set forth as amino acids 4-105 of SEQ ID NO:155. Exemplary anti-Candida domain-exchanged antibodies provided herein are variant or modified 2G12 antibodies.

[0011] In some examples, the anti-Candida domain-exchanged antibody contains a variable heavy chain that includes one or more amino acid residues selected from amino acid residues isoleucine (Ile) at position 19, arginine (Arg) at position 57, phenylalanine (Phe) at position 77 and proline (Pro) or serine (Ser) at position 113, based on Kabat numbering. In other examples, the anti-Candida domain-exchanged antibody contains a variable heavy chain that includes an isoleucine (Ile) at position 19, an arginine (Arg) at position 57, a phenylalanine (Phe) at position 77 and a proline (Pro) or serine (Ser) at position 113, based on Kabat numbering. In some instances, the variable heavy chain of the anti-Candida domain-exchanged antibody further contains an arginine (Arg) at position 39, a serine (Ser) at position 70, an aspartic acid (Asp) at position 72, a tyrosine (Tyr) at position 79, a glutamine (Gln) at position 81, or a valine (Val) at position 84, based on Kabat numbering. In further examples, the domain-exchanged antibody has a variable heavy chain that comprises one or more of amino acid residues isoleucine (Ile) at position 19; arginine (Arg) at position 39; arginine (Arg) at position 57; phenylalanine (Phe) at position 77; valine (Val) at position 84; and proline (Pro) or serine at position 113, based on kabat numbering. The variable heavy chain can also contain one or both of an alanine (Ala) at position 14 or a glutamic acid (Glu) at position 75, based on kabat numbering.

[0012] In some examples, the anti-Candida antibodies provided herein have greater affinity for Candida compared to the affinity of the corresponding form of the domain-exchanged antibody 2G12. A 2G12 includes the full-length 2G12 that has a light chain having the amino acid sequence set forth in SEQ ID NO: 162 and a heavy chain having the amino acid sequence set forth in SEQ ID NO: 160, or fragments thereof.

[0013] Provided herein are anti-Candida antibodies that are full-length domain-exchanged antibodies or antibody fragments of domain-exchanged antibodies. In some examples, the domain-exchanged antibody is a domain-exchanged Fab fragment, a domain-exchanged scFv fragment, a domain-exchanged Fab hinge fragment, domain-exchanged scFv tandem fragment, domain-exchanged scFv tandem fragment, or a domain-exchanged single chain Fab fragment. In some examples, where the domain-exchanged antibody is a domain-exchanged single chain Fab fragment, the antibody contains a peptide linker located between the heavy chain and light chain of the domain-exchanged single chain Fab fragment. Exemplary linkers include, but are not limited to linkers that are about 1-50 amino acids in length.

[0014] Provided herein are anti-Candida antibodies that are modified 2G12 IgG domain-exchanged antibodies. The modified 2G12 anti-Candida domain-exchanged antibodies provided herein contain at least one amino acid replacement, addition or deletion in an unmodified 2G12 that contains a variable heavy chain including at least the sequence of amino acids set forth as amino acids 4-120 of SEQ ID NO: 154 and a variable light chain including at least the sequence of amino acids set forth as amino acids 4-105 of SEQ ID NO: 155. Thus, provided herein are anti-Candida antibodies that are modified 2G 12 IgG domain-exchanged antibodies where the unmodified 2G12 domain-exchanged antibody contains a variable heavy chain having a sequence of amino acids set forth in SEQ ID NO: 154 and a variable light chain having a sequence of amino acids set forth in SEQ ID NO: 155, SEQ ID NO: 176 or SEQ ID NO: 677. In some examples, the one or more modified amino acid residues are in a 2G 12 complementarity determining region (CDR), provided that heavy chain amino acid residue 57, based on Kabat numbering, is not modified.

[0015] Provided herein are anti-Candida antibodies that are modified full-length 2G12 IgG domain-exchanged antibodies. In some examples, where the anti-Candida antibody is a modified 2G12 IgG domain-exchanged antibody, the anti-Candida antibody has greater affinity for Candida compared to the unmodified 2G12 IgG domain-exchanged antibody, where the unmodified 2G12 IgG domain-exchanged antibody comprises a light chain having the amino acid sequence set forth in SEQ ID NO: 162, SEQ ID NO:11 or SEQ ID NO:553 and a heavy chain having the amino acid sequence set forth in SEQ ID NO: 160 or SEQ ID NO:210.

[0016] Also provided herein are anti-Candida antibodies that are modified 2G12 domain-exchanged Fab antibodies. In some examples, where the anti-Candida antibody is a modified 2G12 domain-exchanged Fab antibody, the anti-Candida antibody has greater affinity for Candida compared to the unmodified 2G12 domain-exchanged Fab antibody, the unmodified 2G12 domain-exchanged Fab antibody comprises a light chain having the amino acid sequence set forth in SEQ ID NO: 162, SEQ ID NO: 11 or SEQ ID NO: 553 and a heavy chain having the amino acid sequence set forth in SEQ ID NO: 161. In other examples, where the anti-Candida antibody is a modified 2G12 domain-exchanged Fab antibody, the anti-Candida antibody has greater affinity for Candida compared to the unmodified 2G12 domain-exchanged Fab antibody, the unmodified 2G12 domain-exchanged Fab antibody comprises a light chain having the amino acid sequence set forth in SEQ ID NO: 162, SEQ ID NO: 11 or SEQ ID NO: 553 and a heavy chain having the amino acid sequence set forth in SEQ ID NO: 10.

[0017] Provided herein are anti-Candida antibodies that contain one or more modifications in the variable light chain (V_{L}) complementary determining region 3 (CDR3) compared to the V_{L} CDR3 of 2G12 set forth in SEQ ID NO: 2. Exemplary modifications included, but are not limited to one or more amino acid additions, substitutions or deletions in the V_{L} CDR3 of 2G12. In some examples, the one or more modifications are at one or more positions selected from among L89, L90, L91, L92, L93, L94, and L95 of the V_{L} CDR3 of 2G12, based on Kabat numbering. In other examples, the one or more modifications are amino acid replacements at one or more positions selected from among L89, L90, L91, L92, L93, L94, and L95 of the V_{L} CDR3 of 2G12, based on Kabat numbering. In further examples, the one or more modifications are amino acid additions immediately before or immediately following one or more positions selected from among L89, L90, L91, L92, L93, L94, and L95 of the V_{L} CDR3 of 2G12, based on Kabat numbering.

[0018] For example, modified anti-Candida antibodies provided herein contain one or more modifications at one or more positions selected from among L92, L93, L94, and L95, based on Kabat numbering. In some instances, the modified anti-Candida antibodies provided herein further contain one or more amino acid additions after amino acid residue L95, based on Kabat numbering. In another example, modified anti-Candida antibodies provided herein contain one or more modifications at one or more positions selected from among L89, L90, L91, and L92, based on Kabat numbering.

[0019] Provided herein are anti-Candida antibodies that contain a V_{L} CDR3 having an amino acid sequence set forth in any of SEQ ID NOS:30-90, 218-248, 280-281 or 678-686, or a sequence having 70%, 75%, 80%, 85%, 90%, 91%, 92%, 93%, 94%, 95%, 96%, 97%, 98%, or 99% sequence identity therewith. In some examples, the anti-Candida antibody contains a V_{L} CDR3 selected from among QHYMPYRAS (SEQ ID NO:71), QHYLPFNAT (SEQ ID NO:41), QHYKEWRAT (SEQ ID NO:30), QHYTDHKGAT (SEQ ID NO:88), QHYTDHRGAT (SEQ ID NO:89), QHYRAHTGAT (SEQ ID NO:85), QHYTAHTGAT (SEQ ID NO:86), QHYTDHHGAT (SEQ ID NO:87), QHYTDHYGAT (SEQ ID NO:90), QHYTAHRGAT (SEQ ID NO:84), and QHYRPHTGAT (SEQ ID NO:82), or a sequence having 70%, 75%, 80%, 85%, 90%, 91%, 92%, 93%, 94%, 95%, 96%, 97%, 98%, or 99% sequence identity to any of SEQ ID NOS: 30, 41, 71, 82 or 84-90.

[0020] Provided herein are anti-Candida antibodies that contain a variable light chain containing a sequence of amino acids set forth as amino acids 4-105 of any of SEQ ID NO: 91-151, 249-279, 282-283, 457-550, 687-704, or a sequence having at least 70% sequence identity therewith, and a variable heavy chain containing a sequence of amino acids set forth as amino acids 4-120 of SEQ ID NO: 154. In some examples, the anti-Candida antibody has a variable light chain having a sequence of amino acids set forth as amino acids 1-107 of SEQ ID NOS: 457-508, 518-550 or 696-701, amino acids 1-108 of SEQ ID NOS: 91-142, 249-279, 282-283, 509-517, 687-692 or 702-704 or amino acids 1-109 of SEQ ID NOS: 143-151 or 693-695, or a sequence having at least 70% sequence identity therewith, and a variable heavy chain having a sequence of amino acids set forth in SEQ ID NO:154.

[0021] Provided herein are anti-Candida antibodies that are Fab antibodies that contain a light chain having a sequence of amino acids set forth as amino acids 91-151, 249-279, 282-283, 457-550 or 687-704, or a sequence having at least 70% sequence identity therewith, and a heavy chain containing a sequence of amino acids set forth in SEQ ID NO:161. Also provided herein are full-length anti-Candida antibodies that contain a heavy chain set forth in SEQ ID NO: 160 or SEQ ID NO:210 and a light chain set forth in any of SEQ ID NO: 91-151, 249-279, 282-283, 457-550 or 687-704, or a sequence having 70%, 75%, 80%, 85%, 90%, 91%, 92%, 93%, 94%, 95%, 96%, 97%, 98%, or 99% sequence identity therewith.

[0022] Provided herein are anti-Candida antibodies containing a light chain having a sequence of amino acids set forth in SEQ ID NO:91, 102, 132, 143, or 145-151 and a heavy chain having a sequence of amino acids set forth in SEQ ID NO:10. Also provided herein are anti-Candida antibodies containing a light chain having a sequence of amino acids set forth in SEQ ID NO:91, 102, 132, 143, or 145-151 and a heavy chain having a sequence of amino acids set forth in SEQ ID NO: 209 or 210. In some examples, the anti-Candida antibody provided herein is designated 1H12, 1F8, 4F8, A1E8, A1G7, P1F9, A2A12, P2H12, A4F10, P4H12, or A5G10.

[0023] Provided herein are anti-Candida antibodies that contain a heavy chain that contains a 2G12 variable heavy chain (V_{H}) CDR1 set forth in SEQ ID NO: 163, a 2G12 V_{H} CDR2 set forth in SEQ ID NO:164, and a 2G12 V_{H} CDR3 set forth in SEQ ID NO:152, and a light chain that contains a 2G12 V_{L} CDR1 set forth in SEQ ID NO:165, a 2G12 V_{L} CDR2 set forth in SEQ ID NO:166, and a modified 2G12 V_{L} CDR3. Exemplary modified 2G12 V_{L} CDR3 are set forth in any of SEQ ID NOS: 30-90, 218-248, 280-281 or 678-686.

[0024] Provided herein are anti-Candida antibodies that bind to members of the genus Candida including, but not limited to, C. albicans, C. tropicalis, C. parapsilosis, C. krusei, C. glabrata, C. lusitaniae, C. dubliniensis and C. guilliermondii. In some examples, the anti-Candida antibody provided herein binds to a Candida cell wall mannoprotein.

[0025] The domain-exchanged antibodies provided herein exhibit an affinity for binding to an epitope on Candida of less than or about 100 nM to less than or about 0.1 nM; less than or about 50 nM to less than or about 0.1 nM; less than or about 20 nM to less than or about 0.1 nM; less than or about 10 nM to less than or about 0.1 nM; less than or about 20 nM to less than or about 0.5 nM; less than or about 20 nM to less than or about 1 nM; or less than or about 20 nM to less than or about 5 nM. In some examples, the antibody has an affinity of less than 100 nM for binding to Candida, such as Candida albicans, in an in vitro ELISA binding assay. In some examples, the anti-Candida antibody has an affinity for binding to Candida albicans of less than or about 100 nM to less than or about 0.1 nM; less than or about 50 nM to less than or about 0.1 nM; less than or about 20 nM to less than or about 0.1 nM; less than or about 10 nM to less than or about 0.1 nM; less than or about 20 nM to less than or about 0.5 nM; less than or about 20 nM to less than or about 1 nM; or less than or about 20 nM to less than or about 5 nM. In some examples, the affinity of the anti-Candida antibody provided herein is assessed using an in vitro ELISA binding assay.

[0026] In some examples, the anti-Candida antibodies provided herein are further modified to improve one or more properties of the antibody, such as, but not limited to improved binding or decreased degradation. In some examples, the anti-Candida antibody provided herein is conjugated to polyethylene glycol (PEG). In some examples, the anti-Candida antibodies provided herein are multimerized antibodies, such as a dimer.

[0027] Provided herein are domain-exchanged anti-Candida antibodies that bind to the same epitope as an anti-Candida antibody provided herein, whereby the antibody has greater affinity for Candida compared to the affinity of the corresponding form of the domain-exchanged antibody 2G12.

[0028] Provided herein are anti-Candida antibodies that are conjugates. In some examples, the anti-Candida antibodies can be conjugated directly or indirectly via a linker to a therapeutic agent. In other examples, the anti-Candida antibodies can be conjugated directly or indirectly via a linker to a diagnostic agent. Provided herein are anti-Candida antibodies that contain a therapeutic or a diagnostic agent. Exemplary diagnostic agents include, but are not limited to, an enzyme that induces a detectable signal, a dye label, a fluorescent compound, an electron transfer agent, or a chemiluminescent label. Conjugates of anti-Candida antibodies provided herein are chemically conjugated or are a fusion protein.

[0029] Provided herein are combinations that contain an anti-Candida antibody provided herein and an antifungal agent. In some examples, the antifungal agent is a triazole or an imidazole. Exemplary antifungal agents include, but are not limited to fluconazole, itraconazole, voriconazole, ketoconazole, miconazole, terconazole, clotrimazole, econazole, fenticonazole, sulconazole, tioconazole, isoconazole, omoconazole, oxiconazole, flutrimazole, butoconazole, amphotericin, nystatin, flucytosine, caspofungin, terbinafine, and gentian violet. The antibody and the antifungal agent can be formulated as a single composition or separate compositions.

[0030] Provided herein are combinations that contain a first antibody that is an anti-Candida antibody provided herein and one or more additional antifungal antibodies that differ from the first antibody. In some examples, the combination contains two or more different anti-Candida antibodies. In some example, the combination contains two or more different anti-Candida antibodies selected from among the anti-Candida antibodies provided herein. In some examples, the combination contains one or more additional anti-Candida antibodies where the one or more additional anti-Candida antibodies is selected from among anti-glucan antibodies, anti-mannoprotein antibodies, anti-integrin-like protein antibodies, and antibodies that bind to Candida secretory aspartic proteases. In some examples, the anti-glucan antibody is an anti-β-1,3-glucan antibody or an anti-β-1,6-glucan antibody. In some examples, the combination contains one or more additional antifungal antibodies, where the one or more additional antifungal antibodies is a single-chain Fv (scFv), Fab, Fab′, F(ab′)₂, Fv, dsFv, diabody, Fd, Fd′ fragment, or a domain-exchanged antibody.

[0031] Provided herein are pharmaceutical compositions containing an anti-Candida antibody provided herein or a combination containing an antibody provided herein and a pharmaceutically acceptable carrier or excipient. In some examples, the pharmaceutical composition further contains one or more additional antifungal antibodies that differ from the first antibody. In some examples, the one or more additional antifungal antibodies is an anti-Candida antibody, including, but not limited to, an anti-Candida antibody provided herein. In some examples, the one or more additional antifungal antibodies is selected from among anti-glucan antibodies, anti-mannoprotein antibodies, anti-integrin-like protein antibodies, and antibodies that bind to Candida secretory aspartic proteases. Exemplary anti-glucan antibodies include an anti-β-1,3-glucan antibody or an anti-β-1,6-glucan antibody. In some examples, the pharmaceutical composition further contains one or more additional antifungal antibodies, where the one or more additional antifungal antibodies is a single-chain Fv (scFv), Fab, Fab′, F(ab′)₂, Fv, dsFv, diabody, Fd, Fd′ fragment, or a domain-exchanged antibody.

[0032] Provided herein are pharmaceutical compositions containing an anti-Candida antibody provided herein formulated as a gel, ointment, cream, paste, suppository, flush, liquid, suspension, aerosol, tablet, pill or powder. In some examples, the pharmaceutical compositions provided herein are formulated for systemic, parenteral, topical, oral, mucosal, intranasal, subcutaneous, aerosolized, intravenous, bronchial, pulmonary, vaginal, vulvovaginal, esophageal, or oesophageal administration. In some examples, the pharmaceutical compositions provided herein are formulated for single dosage administration. In some examples, the pharmaceutical compositions provided herein are formulated for sustained release.

[0033] Provided herein are methods of treating a fungal infection in a subject, which involve administering to the subject a therapeutically effective amount of a pharmaceutical composition containing an anti-Candida antibody provided herein. Provided herein are methods of treating or inhibiting one or more symptoms of a fungal infection in a subject, which involve administering to the subject a therapeutically effective amount of a pharmaceutical composition containing an anti-Candida antibody provided herein. Provided herein are methods of preventing a fungal infection in a subject, which involve administering to the subject a therapeutically effective amount of a pharmaceutical composition containing an anti-Candida antibody provided herein. In some examples of the methods, the fungal infection is a Candida infection, such as, but not limited to Candida vaginitis, mucocutaneous candidiasis, or disseminated candidiasis. In some examples of the methods, the pharmaceutical composition provided herein is administered to a mammal. In some examples of the methods, the pharmaceutical composition provided herein is administered to a human subject. In some examples of the methods, the pharmaceutical composition provided herein is administered to a human infant, a human infant born prematurely or at risk of hospitalization for a fungal infection, an elderly human, a human subject who has congenital immunodeficiency, acquired immunodeficiency, leukemia, or non-Hodgkin lymphoma, is receiving or has received high dosage antibiotic therapy, or a human subject having an organ or tissue transplant or a blood transfusion. In some examples, an organ or tissue transplant subject is a patient that has received a bone marrow transplant or a liver transplant.

[0034] In some examples of the methods, the pharmaceutical composition containing an anti-Candida antibody provided herein is administered topically, parenterally, locally, or systemically. For examples, the pharmaceutical composition provided herein can be administered intranasally, intramuscularly, intradermally, intraperitoneally, intravenously, subcutaneously, orally, vaginally, vulvovaginally, esophageally, oroesophageally, bronchially, or by pulmonary administration. In some examples, the pharmaceutical composition is administered one time, two times, three times, four times, five times, six times, seven times, eight times, nine times, or ten times for the treatment of a fungal infection.

[0035] Provided herein are methods of preventing or treating a fungal infection in a subject, involving the administration of a pharmaceutical composition provided herein and one or more antifungal agents. In some examples, the antifungal agent that is administered is a triazole or an imidazole. Exemplary antifungal agents include, but are not limited to fluconazole, itraconazole, voriconazole, ketoconazole, miconazole, terconazole, clotrimazole, econazole, fenticonazole, sulconazole, tioconazole, isoconazole, omoconazole, oxiconazole, flutrimazole, butoconazole, amphotericin, nystatin, flucytosine, caspofungin, terbinafine, and gentian violet. The antibody and the antifungal agent can be formulated as a single composition or separate compositions. The pharmaceutical composition and the antifungal agent can be administered sequentially, simultaneously or intermittently.

[0036] Provided herein are methods of preventing or treating a fungal infection in a subject, involving the administration of a pharmaceutical composition provided herein and one or more additional antifungal antibodies. In some examples, the one or more additional antifungal antibodies are anti-Candida antibodies. In some examples, the one or more additional anti-Candida antibodies are selected from among anti-glucan antibodies, anti-mannoprotein antibodies, anti-integrin-like protein antibodies, and antibodies that bind to Candida secretory aspartic proteases. In some examples, the anti-glucan antibody is an anti-β-1,3-glucan antibody or an anti-β-1,6-glucan antibody. In some examples, the pharmaceutical composition and the one or more additional antifungal antibodies are formulated as a single composition or separate compositions. The pharmaceutical composition and the one or more additional antifungal antibodies can be administered sequentially, simultaneously or intermittently.

[0037] In some examples, the pharmaceutical composition provided herein can be used to formulate a medicament for treating a fungal infection in a subject. In other examples, the pharmaceutical composition provided herein can be used to treat or inhibit one or more symptoms of a fungal infection in a subject. In further examples, the pharmaceutical composition provided herein can be used to prevent a fungal infection in a subject. Also provided herein are pharmaceutical compositions containing an anti-Candida antibody provided herein, for treating a fungal infection in a subject; for treating or inhibiting one or more symptoms of a fungal infection in a subject; or for preventing a fungal infection in a subject.

[0038] Provided herein are methods detecting a fungal infection, involving the steps of (a) contacting an anti-Candida antibody provided herein with a sample; and (b) comparing the assayed level of Candida antigen with a control level, whereby an increase in the assayed level of Candida antigen compared to the control level of the Candida antigen is indicative of a Candida infection. In some examples of the methods, the sample is a fluid, cell, or tissue sample, such as, but not limited to, a blood, urine, saliva, vaginal mucous, lung sputum, lavage or lymph sample. In some examples, the fluid, cell, or tissue sample is obtained from a human subject.

[0039] Provided herein are nucleic acids that encode an anti-Candida antibody provided herein. Provided herein are vectors that contain a nucleic acid that encodes an anti-Candida antibody provided herein. Provided herein are cells that contain nucleic acid encoding the anti-Candida antibody provided herein. Provided herein are nucleic acids that encode a light chain of an anti-Candida antibody provided herein. Provided herein are vectors that contain a nucleic acid that encodes a light chain of an anti-Candida antibody provided herein. Provided herein are cells that contain nucleic acid encoding a light chain of an anti-Candida antibody provided herein. Also provided herein are cell that contains an anti-Candida antibody provided herein, a nucleic acid provided herein, or a vector provided herein. In some examples, the cell is a prokaryotic or eukaryotic cell. Also provided herein are transgenic animals that contain a nucleic acid encoding the anti-Candida antibody provided herein.

[0040] Provided herein are methods of expression an anti-Candida antibody provided herein, which involve culturing a cell that contains nucleic acid encoding an anti-Candida antibody provided herein under conditions which express the encoded antibody and isolating the antibody from the cell culture. Provided herein are methods of expression an anti-Candida antibody provided herein, which involve introducing a vector provided herein containing a light chain of the antibody and a vector provided herein containing a heavy chain of the antibody into a host cell, and culturing the host cell under conditions which express the encoded antibody and recovering the antibody. Provided herein are methods of expression an anti-Candida antibody provided herein, which involve isolating the antibody from the transgenic animal that expresses the anti-Candida antibody provided herein. In some examples, the antibody is isolated from the serum or milk of the transgenic animal.

[0041] Provided herein are kits that contain an anti-Candida antibody provided herein, in one or more containers, and instructions for use for prophylactic, therapeutic, or diagnostic use.

### BRIEF DESCRIPTION OF THE DRAWINGS

[0042] FIG. 1: Comparison of Conventional and Domain-Exchanged Antibodies

[0043] FIG. 1 is an illustrative comparison of a full-length conventional IgG antibody (left) and an exemplary full-length domain-exchanged IgG antibody. As shown, the conventional full-length antibody contains two heavy (H and H′) and two light (L and L′) chains, and two antibody combining sites, each formed by residues of one heavy and one light chain. By contrast, the heavy chains in the exemplary domain-exchanged antibody are interlocked, resulting in pairing of the heavy chain variable regions (V_{H} and V_{H}′) with the opposite light chain variable regions (V_{L}′ and V_{L}, respectively), forming a pair of conventional antibody combining sites, locked in space. As described herein, the V_{H}-V_{H}′ interface can form a non-conventional antibody combining site, containing residues of the two adjacent heavy chain variable regions (V_{H} and V_{H}′). The number (35 Å (angstroms)) represents the distance between the two conventional antibody combining sites in this exemplary domain-exchanged antibody. For each antibody, the two heavy chains, H and H′ are illustrated in grey and black, respectively; the two light chains, L and L′, are illustrated with open and hatched boxes, respectively. The specific domains (e.g. V_{H}, V_{L}, C_{H}1, C_{L}) are indicated.

[0044] FIG. 2. 2G12 pCAL IT* Vector

[0045] FIG. 2 depicts the 2G12 pCAL IT* vector. The 2G12 pCAL IT* vector can be used to express, with reduced toxicity, Fab fragments of the domain-exchanged 2G12 antibody, which recognize the HIV gp120 antigen. Expression as both soluble 2G12 Fab fragments and 2G12-gIII coat protein fusion proteins for display on phage particles can be effected in partial amber suppressor cells by virtue of the amber stop codon between the nucleotides encoding the 2G12 heavy chain and nucleotides encoding the truncated gIII coat protein. The polynucleotide encoding the 2G12 light chain is linked to the PelB leader sequence, and the 2G12 heavy chain is linked to the OmpA leader sequence. The inclusion of an amber stop codon in each of the leader sequences results in reduced expression of the 2G12 heavy and light chains in partial amber suppressor strains following induction with, for example IPTG. The reduced expression can lead to reduced toxicity of the 2G12 Fab to the host cells.

[0046] FIG. 3: Randomization of 3-ALA LC 2G12 Fragment Target Polypeptide Using mFAL-SPA

[0047] FIG. 3 illustrates the mFAL-SPA process that was used to randomize the CDR3 of the light chain of 2G12 domain-exchanged Fab fragment target polypeptide, as described in Example 2, below. FIG. 3A: Six pools of randomized oligonucleotides (AGYS, SYGA, AGYS+1, SYGA+1, AGYS+2, and SYGA+2); illustrated as open boxes with hatched portions representing randomized portions) were designed and hybridized to form three pools of randomized duplexes (DO, DO+1, and DO+2), containing overhangs. FIG. 3B: Two pools of reference sequence duplexes (1, and 2) were generated using PCR with two pools of forward oligonucleotide primers (2G12LCF and L2F) and two pools of reverse oligonucleotide primers (L1R and 2G12LCR). Two of the primers, 2G12LCF and 2G12LCR, contained a recognition site for the Sap I restriction endonuclease (indicated by a portion with vertical lines). FIG. 3C: Reference sequence duplexes were cut with the Sap I restriction endonuclease, generating reference sequence duplexes with Sap I overhangs compatible to those in the randomized duplexes. FIG. 3D: The reference sequence and randomized pools of duplexes with overhangs then were combined under conditions whereby they hybridized through complementary overhangs and nicks (indicated with arrows) were sealed with a ligase, forming a pool of intermediate duplexes, which then was used in an SPA reaction (not shown) with a CALX24 single primer pool to generate a collection of variant assembled duplexes. One forward primer pool (F1), and one reverse primer pool (R3) contained a non gene-specific nucleotide sequence (Region X; depicted in black), which was identical to the nucleotide sequence of the CALX24 primer, such that reference sequence duplexes 1 and 2 contained a sequence of nucleotides including Region X, and a complementary Region Y, which served as template sequences for the primers in the SPA. The assembled duplexes can be digested to form assembled duplex cassettes with restriction enzymes recognizing restriction sites within the portion illustrated in black.

[0048] FIG. 4: Sequence of Domain-Exchanged Antibody 2G12. FIG. 4 depicts the sequence of 2G12 (SEQ ID NOS:154 and 155). FIG. 4A depicts the sequence of the variable heavy chain. FIG. 4B depicts the sequence of the variable light chain. The sequences are numbered according to Kabat and complementarity determining regions (CDRs) are identified in boldface type. For purposes herein, reference to residues in a light chain of a domain-exchanged antibody, for example, 2G12, recites “L” for light followed by the amino acid position based on Kabat numbering. Reference to residues in a heavy chain of a domain-exchanged antibody, for example 2G12, recites “H” for heavy followed by the amino acid position based on Kabat numbering. For example, L96 refers to residue 96, based on Kabat numbering, which is in the CDRL3 of the light chain. Residue L96 also can be referenced as Ala^{L96}, which means that the amino acid residue at position 96, based on Kabat numbering, in the light chain is Ala.

### DETAILED DESCRIPTION

### A. DEFINITIONS

### B. DOMAIN-EXCHANGED ANTIBODIES

[0049] 2G12 Domain-exchanged Antibody

### C. ANTI-Candida ANTIBODIES

[0050] 1. Variant 2G12 Anti-Candida Antibodies

[0051] 2. Other anti-Candida domain-exchanged antibodies

### D. ADDITIONAL MODIFICATIONS OF ANTI-Candida ANTIBODIES

[0052] 1. Modifications to reduce immunogenicity

[0053] 2. Fc Modifications

[0054] 3. Pegylation

[0055] 4. Modification with other heterologous peptides

### E. METHODS OF IDENTIFYING ANTI-CANDIDA DOMAIN-EXCHANGED ANTIBODIES

[0056] 1. Domain-Exchanged Antibody Libraries
[0057] a. Variant libraries
   [0058] i. Selecting Residues
   [0059] ii. Randomization and diversification methods
      [0060] (1) Design, Synthesis and Assembly of Randomized Oligonucleotides
[0061] b. Quick Libraries and Hybrid Libraries

[0062] 2. Display Libraries and Screening
[0063] a. Vectors
   [0064] i. pCAL Phagemid Vectors
[0065] b. Display Methods
   [0066] i. Phage Display
   [0067] ii. Other Display Methods
      [0068] (1) Cell surface display
      [0069] (2) Other display systems
[0070] c. Screening
   [0071] Functional Screening

### F. METHODS OF PRODUCTION OF ANTIBODIES

[0072] 1. Methods of Expression of Domain-Exchanged Antibodies
[0073] a. Domain-Exchanged Fab Fragment
[0074] b. Domain-exchanged scFv fragment
[0075] c. Domain-exchanged Fab hinge fragment
[0076] d. Domain-exchanged scFv tandem fragment
[0077] e. Domain-exchanged single chain Fab fragments
[0078] f. Domain-exchanged Fab Cys 19
[0079] g. Domain-exchanged scFv hinge

[0080] 2. Vectors

[0081] 3. Cells and Expression Systems
[0082] a. Prokaryotic Expression
[0083] b. Yeast
[0084] c. Insects
[0085] d. Mammalian Cells
[0086] e. Plants

[0087] 4. Purification

### G. ASSESSING ANTI-CANDIDA ANTIBODY PROPERTIES AND ACTIVITIES

[0088] 1. Binding Assays

[0089] 2. In vitro assays for analyzing Candida inhibitory effects of antibodies

[0090] 3. In vivo animal models for assessing antibody efficacy

### H. DIAGNOSTIC USES

[0091] 1. In vitro detection of pathogenic infection

[0092] 2. In vivo detection of pathogenic infection

[0093] 3. Monitoring Infection

### I. PROPHYLACTIC AND THERAPEUTIC USES

[0094] 1. Subjects for therapy

[0095] 2. Dosages

[0096] 3. Routes of Administration

[0097] 4. Combination therapies

[0098] 5. Gene Therapy

J. Pharmaceutical Compositions, Combinations and Articles of manufacture/Kits

[0099] 1. Pharmaceutical Compositions

[0100] 2. Articles of Manufacture/Kits

[0101] 3. Combinations

### K. Examples

### A. DEFINITIONS

[0102] Unless defined otherwise, all technical and scientific terms used herein have the same meaning as is commonly understood by one of skill in the art to which the invention(s) belong. All patents, patent applications, published applications and publications, GENBANK sequences, websites and other published materials referred to throughout the entire disclosure herein, unless noted otherwise, are incorporated by reference in their entirety. In the event that there is a plurality of definitions for terms herein, those in this section prevail. Where reference is made to a URL or other such identifier or address, it is understood that such identifiers can change and particular information on the internet can come and go, but equivalent information is known and can be readily accessed, such as by searching the internet and/or appropriate databases. Reference thereto evidences the availability and public dissemination of such information.

[0103] As used herein, “antibody” refers to immunoglobulins and immunoglobulin fragments, whether natural or partially or wholly synthetically, such as recombinantly, produced, including any fragment thereof containing at least a portion of the variable region of the immunoglobulin molecule that retains the binding specificity ability of the full-length immunoglobulin. Hence, an antibody includes any protein having a binding domain that is homologous or substantially homologous to an immunoglobulin antigen-binding domain (antibody combining site). For example, an antibody refers to an antibody that contains two heavy chains (which can be denoted H and H′) and two light chains (which can be denoted L and L′), where each heavy chain can be a full-length immunoglobulin heavy chain or a portion thereof sufficient to form an antigen binding site (e.g. heavy chains include, but are not limited to, V_{H}, chains V_{H}-C_{H}1 chains and V_{H}-C_{H}1-C_{H}2-C_{H}3 chains), and each light chain can be a full-length light chain or a portion thereof sufficient to form an antigen binding site (e.g. light chains include, but are not limited to, V_{L} chains and V_{L}-C_{L} chains). Each heavy chain (H and H′) pairs with one light chain (L and L′, respectively). Typically, antibodies minimally include all or at least a portion of the variable heavy (V_{H}) chain and/or the variable light (V_{L}) chain. The antibody also can include all or a portion of the constant region. Antibodies include antibody fragments, such as anti-Candida antibody fragments. As used herein, the term antibody, thus, includes synthetic antibodies, recombinantly produced antibodies, multispecific antibodies (e.g., bispecific antibodies), human antibodies, non-human antibodies, humanized antibodies, chimeric antibodies, intrabodies, and antibody fragments, such as, but not limited to, Fab fragments, Fab′ fragments, F(ab′)₂ fragments, Fv fragments, disulfide-linked Fvs (dsFv), Fd fragments, Fd′ fragments, single-chain Fvs (scFv), single-chain Fabs (scFab), diabodies, anti-idiotypic (anti-Id) antibodies, or antigen-binding fragments of any of the above. Antibodies provided herein include members of any immunoglobulin type (e.g., IgG, IgM, IgD, IgE, IgA and IgY), any class (e.g. IgG1, IgG2, IgG3, IgG4, IgA1 and IgA2) or subclass (e.g., IgG2a and IgG2b).

[0104] As used herein, a full-length antibody is an antibody having two full-length heavy chains (e.g. V_{H}-C_{H}1-C_{H}2-C_{H}3 or V_{H}-C_{H}1-C_{H}2-C_{H}3-C_{H}4) and two full-length light chains (V_{L}-C_{L}) and hinge regions, such as human antibodies produced by antibody secreting B cells and antibodies with the same domains that are produced synthetically.

[0105] As used herein, an “antibody fragment” or antibody portion with reference to a “portion thereof” or “fragment thereof” of an antibody refers to any portion of a full-length antibody that is less than full length but contains at least a portion of the variable region of the antibody sufficient to form an antigen binding site (e.g. one or more CDRs and/or one or more antibody combining sites) and thus retains the binding specificity, and at least a portion of the specific binding ability of the full-length antibody. Antibody fragments include antibody derivatives produced by enzymatic treatment of full-length antibodies, as well as synthetically, e.g. recombinantly produced derivatives. An antibody fragment is included among antibodies. Examples of antibody fragments include, but are not limited to, Fab, Fab′, F(ab′)₂, single-chain Fvs (scFv), Fv, dsFv, diabody, Fd and Fd′ fragments, domain-exchanged fragments, such as domain-exchanged scFv fragments, domain-exchanged scFv tandem fragments, domain-exchanged scFv hinge fragments, domain-exchanged Fab fragments, domain-exchanged single chain Fab fragments (scFab), domain-exchanged Fab hinge fragments, and other modified domain-exchanged fragments and other fragments, including modified fragments (see, for example, Methods in Molecular Biology, Vol 207: Recombinant Antibodies for Cancer Therapy Methods and Protocols (2003); Chapter 1; p 3-25, Kipriyanov). The fragment can include multiple chains linked together, such as by disulfide bridges and/or by peptide linkers. An antibody fragment generally contains at least about 50 amino acids and typically at least 200 amino acids.

[0106] Hence, reference to an “antibody or portion thereof that is sufficient to form an antigen binding site” means that the antibody or portion thereof contains at least 1 or 2, typically 3, 4, 5 or all 6 CDRs of the V_{H} and V_{L} sufficient to retain at least a portion of the binding specificity of the corresponding full-length antibody containing all 6 CDRs. Generally, a sufficient antigen binding site at least requires CDR3 of the heavy chain (CDRH3). It typically further requires the CDR3 of the light chain (CDRL3). As described herein, one of skill in the art knows and can identify the CDRs based on Kabat or Chothia numbering (see e.g., Kabat, E. A. et al. (1991) Sequences of Proteins of Immunological Interest, Fifth Edition, U.S. Department of Health and Human Services, NIH Publication No. 91-3242, and Chothia, C. et al. (1987) J. Mol. Biol. 196:901-917).

[0107] As used herein, an antigen-binding fragment refers to an antibody fragment that contains an antigen-binding portion that binds to the same antigen as the antibody from which the antibody fragment is derived. An antigen-binding fragment, as used herein, includes any antibody fragment that when inserted into an antibody framework (such as by replacing a corresponding region) results in an antibody that immunospecifically binds (i.e. exhibits Ka of at least or at least about 10⁷-10⁸ M⁻¹) to the antigen. Antigen-binding fragments include, antibody fragments, such as Fab fragments, Fab′ fragments, F(ab′)₂ fragments, Fv fragments, disulfide-linked Fvs (dsFv), Fd fragments, Fd′ fragments, single-chain Fvs (scFv), single-chain Fabs (scFab), and also includes other fragments, such as CDR-containing fragments, and polypeptides that immunospecifically bind to an antigen or that when inserted into an antibody framework results in an antibody that immunospecifically binds to the antigen.

[0108] As used herein, an Fv antibody fragment is composed of one variable heavy domain (V_{H}) and one variable light (V_{L}) domain linked by noncovalent interactions.

[0109] As used herein, a dsFv refers to an Fv with an engineered intermolecular disulfide bond, which stabilizes the V_{H}-V_{L} pair.

[0110] As used herein, an Fd fragment is a fragment of an antibody containing a variable domain (V_{H}) and one constant region domain (C_{H}1) of an antibody heavy chain.

[0111] As used herein, a Fab fragment is an antibody fragment that results from digestion of a full-length immunoglobulin with papain, or a fragment having the same structure that is produced synthetically, e.g. by recombinant methods. A Fab fragment contains a light chain (containing a V_{L} and C_{L}) and another chain containing a variable domain of a heavy chain (V_{H}) and one constant region domain of the heavy chain (C_{H}1).

[0112] As used herein, a F(ab′)₂ fragment is an antibody fragment that results from digestion of an immunoglobulin with pepsin at pH 4.0-4.5, or a fragment having the same structure that is produced synthetically, e.g. by recombinant methods. The F(ab′)₂ fragment essentially contains two Fab fragments where each heavy chain portion contains an additional few amino acids, including cysteine residues that form disulfide linkages joining the two fragments.

[0113] As used herein, a Fab′ fragment is a fragment containing one half (one heavy chain and one light chain) of the F(ab′)₂ fragment.

[0114] As used herein, an Fd′ fragment is a fragment of an antibody containing one heavy chain portion of a F(ab′)₂ fragment.

[0115] As used herein, an Fv′ fragment is a fragment containing only the V_{H} and V_{L} domains of an antibody molecule.

[0116] As used herein, hsFv refers to antibody fragments in which the constant domains normally present in a Fab fragment have been substituted with a heterodimeric coiled-coil domain (see, e.g., Arndt et al. (2001) J Mol Biol. 7(312):221-228).

[0117] As used herein, an scFv fragment refers to an antibody fragment that contains a variable light chain (V_{L}) and variable heavy chain (V_{H}), covalently connected by a polypeptide linker in any order. The linker is of a length such that the two variable domains are bridged without substantial interference. Exemplary linkers are (Gly-Ser)ₙ residues with some Glu or Lys residues dispersed throughout to increase solubility.

[0118] As used herein, an “antibody hinge region” or “hinge region” refers to a polypeptide region that exists naturally in the heavy chain of the gamma, delta and alpha antibody isotypes, between the C_{H}1 and C_{H}2 domains that has no homology with the other antibody domains. This region is rich in proline residues and gives the IgG, IgD and IgA antibodies flexibility, allowing the two “arms” (each containing one antibody combining site) of the Fab portion to be mobile, assuming various angles with respect to one another as they bind antigen. This flexibility allows the Fab arms to move in order to align the antibody combining sites to interact with epitopes on cell surfaces or other antigens. Two interchain disulfide bonds within the hinge region stabilize the interaction between the two heavy chains. In some embodiments provided herein, the synthetically produced antibody fragments contain one or more hinge region, for example, to promote stability via interactions between two antibody chains. Hinge regions are exemplary of dimerization domains.

[0119] As used herein, diabodies are dimeric scFv; diabodies typically have shorter peptide linkers than scFvs, and preferentially dimerize.

[0120] As used herein, “monoclonal antibody” refers to a population of identical antibodies, meaning that each individual antibody molecule in a population of monoclonal antibodies is identical to the others. This property is in contrast to that of a polyclonal population of antibodies, which contains antibodies having a plurality of different sequences. Monoclonal antibodies can be produced by a number of well-known methods (Smith et al. (2004) J. Clin. Pathol. 57, 912-917; and Nelson et al., (2000) J Clin Pathol 53, 111-117). For example, monoclonal antibodies can be produced by immortalization of a B cell, for example through fusion with a myeloma cell to generate a hybridoma cell line or by infection of B cells with virus such as EBV. Recombinant technology also can be used to produce antibodies in vitro from clonal populations of host cells by transforming the host cells with plasmids carrying artificial sequences of nucleotides encoding the antibodies.

[0121] As used herein, a “conventional antibody” refers to an antibody that contains two heavy chains (which can be denoted H and H′) and two light chains (which can be denoted L and L′) and two antibody combining sites, where each heavy chain can be a full-length immunoglobulin heavy chain or any functional region thereof that retains antigen-binding capability (e.g. heavy chains include, but are not limited to, V_{H}, chains V_{H}-C_{H}1 chains and V_{H}-C_{H}1-C_{H}2-C_{H}3 chains), and each light chain can be a full-length light chain or any functional region of (e.g. light chains include, but are not limited to, V_{L} chains and V_{L}-C_{L} chains). Each heavy chain (H and H′) pairs with one light chain (L and L′, respectively).

[0122] As used herein, a “domain-exchanged antibody” refers to any antibody (including any antibody fragment) that has a domain-exchanged three-dimensional structural configuration, characterized by the pairing of each heavy chain variable region with the opposite light chain variable region (and optionally the opposite light chain constant region), where the pairing is opposite as compared to heavy-light chain pairing in a conventional antibody, and by the formation of an interface (V_{H}-V_{H}′ interface) between adjacently positioned V_{H} domains (see, e.g. FIG. 1, comparing exemplary conventional and domain-exchanged full-length IgG antibodies), including any antibody fragment derived from such an antibody that retains the V_{H}-V_{H}′ interface and at least a portion of the antigen specificity of the antibody. This V_{H}-V_{H}′ interface can contain one or more non-conventional antibody combining sites. In one example, the opposite pairing and V_{H}-V_{H}′ interface are formed by interlocked heavy chains.

[0123] As used herein, a domain-exchanged Fab fragment is a domain-exchanged antibody fragment that contains two copies each of a light (V_{L}-C_{L}, V_{L}′-C_{L}′) chain and a heavy (V_{H}-C_{H}1, V_{H}′-C_{H}1′) chain, which are folded in the domain-exchanged configuration, where each heavy chain variable region pairs with the opposite light chain variable region compared to a conventional antibody, and an interface (V_{H}-V_{H}′) is formed between adjacently positioned V_{H} domains. Typically, the fragment contains two conventional antibody combining sites and at least one non-conventional antibody combining site (contributed to by residues at the V_{H}-V_{H}′ interface).

[0124] As used herein, a domain-exchanged single chain Fab fragment (scFab) is a domain-exchanged Fab fragment, further including peptide linkers between each V_{H} and V_{L}. In some examples of a domain-exchanged scFab fragment (e.g. domain-exchanged scFabΔC2 fragment), one or more cysteines are mutated compared to the native scFab fragment, to eliminate one or more disulfide bonds between constant regions.

[0125] As used herein, a domain-exchanged Fab hinge fragment is a domain-exchanged Fab fragment, further containing an antibody hinge region adjacent to each heavy chain constant region.

[0126] As used herein, a domain-exchanged scFv fragment is a domain-exchanged antibody fragment containing two chains, each of which contains one V_{H} and one V_{L} domain, joined by a peptide linker (V_{H}-linker-V_{L}). The two chains interact through the V_{H} domains, producing the V_{H}-V_{H}′ interface characteristic of the domain-exchanged configuration. Typically, the V_{H}-linker-V_{L} sequence of amino acids in each chain is identical.

[0127] A domain-exchanged scFv hinge fragment is a domain-exchanged scFv fragment further containing an antibody hinge region adjacent to each V_{H} domain.

[0128] As used herein, a domain-exchanged scFv tandem fragment refers to a domain-exchanged antibody fragment containing two V_{H} domains and two V_{L} domains, each in a single chain and separated by polypeptide linkers. The linear configuration of these domains is V_{L}-linker-V_{H}-linker-V_{H}-linker-V_{L}. In one example, for display on genetic packages, the fragment further includes a coat protein, e.g. a phage coat protein, at one or the other end of the molecule, adjacent or in close proximity to one of the V_{L} chains.

[0129] As used herein, 2G12 refers to the domain-exchanged human monoclonal IgG1 antibody produced from the hybridoma cell line CL2 (as described in U.S. Pat. No. 5,911,989; Buchacher et al., (1994) AIDS Research and Human Retroviruses, 10(4) 359-369; and Trkola et al., (1996) Journal of Virology, 70(2):1100-1108), and any synthetically, e.g. recombinantly, produced antibody having the identical sequence of amino acids, including any antibody fragment thereof having at least the antigen-binding portions of the heavy and light chain variable region domains to the full-length antibody, such as the 2G12 domain-exchanged Fab fragment (see, for example, Published U.S. Application, Publication No. US20050003347 and Calarese et al., (2003) Science, 300:2065-2071, including supplemental information). For example, 2G12 includes a full length antibody having a heavy chain set forth in SEQ ID NO:160 and a light chain set forth in SEQ ID NO:162. 2G12 antibodies also include antibody fragments thereof that at least include the variable heavy chain set forth in SEQ ID NO:154 and the variable light chain set forth in SEQ ID NO:155. For example, 2G12 Fab fragments have a heavy chain with a sequence of amino acids set forth in SEQ ID NO:161 and a light chain with a sequence of amino acids set forth in SEQ ID NO:162. It is understood that variation of the sequence of amino acids of any of SEQ ID NOS: 154, 155 or 160-162 can occur at the N- or C-terminus and still be a 2G12 antibody if binding of the antibody is retained. Thus, 1, 2, 3, or 4 amino acids can be varied, such as by substitution, addition, or deletion. For example, variation can occur as a result of cloning procedures or for other reasons. It also is understood that due to cloning artifacts or other variation introduced by cloning, that variation can also exist in other regions of the sequence. For purposes herein, reference to 2G12 is to an antibody that at least includes a variable heavy chain with the sequence of amino acids set forth as amino acids 4-120 of SEQ ID NO: 154 and a variable light chain with the sequence of amino acids set forth as amino acids 4-105 of SEQ ID NO:155. Thus, 2G12 includes an antibody having a variable heavy chain set forth in SEQ ID NO: 154 and a variable light chain set forth in SEQ ID NO:155, 176 or 667. 2G12 also includes a Fab form that has a heavy chain sequence set forth in SEQ ID NO: 10 and a light chain sequence set forth in SEQ ID NO: 11, 162 or 553. 2G12 also includes a full-length form that has a heavy chain sequence set forth in SEQ ID NO:160 or 210 and a light chain sequence set forth in SEQ ID NOS: 11, 162 or 553. 2G12 antibodies specifically bind HIV gp120 antigen.

[0130] As used herein, recitation that a domain-exchanged antibody is “not 2G12” means that the antibody does not have a sequence of amino acids that contains the same sequence of amino acids as the domain-exchanged human monoclonal IgG1 antibody produced from the hybridoma cell line CL2. Hence, a domain-exchanged antibody that is not 2G12 does not have a variable heavy chain containing the sequence of amino acids set forth as amino acids 4-120 of SEQ ID NO: 154 and a variable light chain containing the sequence of amino acids set forth as amino acids 4-105 of SEQ ID NO:155. A domain-exchanged antibody that is not 2G12 includes any domain-exchanged antibody that has a sequence that is different then 2G12. A domain-exchanged antibody that is not 2G12 includes a modified or variant 2G12 antibody.

[0131] As used herein, a “modified 2G12” or “variant 2G12” antibody refers to an antibody, or portion thereof, that contains one or more amino acid modifications in 2G12. An amino acid modification includes an amino acid deletion, replacement (or substitution), or addition (or insertion). A modified antibody can contain 1, 2, 3, 4, 5, 6, 7, 8, 9, 10, 11, 12, 13, 14, 15, 16, 17, 18, 19, 20, 21, 22, 23, 24, 25, 26, 27, 28, 29, or more amino acid modifications. Typically, an amino acid modification is an amino acid replacement or addition. For purposes herein, modified 2G12 antibodies include antibodies that contain modifications in one or more complementarity determining regions (CDRs). It is understood that the 2G12 antibody also can contain modifications in other regions of the antibody, for example, any that are described herein or known to one of skill in the art.

[0132] As used herein, “gp120,” “HIV gp120” and “gp120 antigen” refer to the HIV envelope surface glycoprotein, epitopes of which are specifically recognized and bound by the 2G12 antibody. HIV gp120 (GENBANK gi:28876544) is one of two cleavage products resulting from cleavage of the gp160 precursor glycoprotein (GENBANK gi:9629363). gp120 can refer to the full-length gp120 or a fragment thereof containing epitopes bound by the 2G12 antibody.

[0133] As used herein, the term “derivative” refers to a polypeptide that contains an amino acid sequence of an anti-Candida antibody which has been modified, for example, by the introduction of amino acid residue substitutions, deletions or additions, by the covalent attachment of any type of molecule to the polypeptide (e.g., by glycosylation, acetylation, pegylation, phosphorylation, amidation, derivatization by known protecting/blocking groups, proteolytic cleavage, linkage to a cellular ligand or other protein). A derivative of an anti-Candida antibody can be modified by chemical modifications using techniques known to those of skill in the art, including, but not limited to, specific chemical cleavage, acetylation, formylation, metabolic synthesis of tunicamycin. Further, a derivative of an anti-Candida antibody can contain one or more non-classical amino acids. Typically, a polypeptide derivative possesses a similar or identical function as an anti-Candida antibody provided herein (e.g. inhibition of Candida infection).

[0134] As used herein, Candida spp. refers to any member of the Candida genus of yeast. The genus Candida includes species such as, but not limited to, C. albicans, C. ascalaphidarum, C. amphixiae, C. antarctica, C. atlantica, C. atmosphaerica, C. blattae, C. carpophila, C. cerambycidarum, C. chauliodes, C. corydali, C. dosseyi, C. dubliniensis, C. ergatensis, C. fructus, C. glabrata, C. fermentati, C. guilliermondii, C. haemulonii, C. insectamens, C. insectorum, C. intermedia, C. jeffresii, C. kefrr, C. krusei, C. lusitaniae, C. lyxosophila, C. maltosa, C. membranifaciens, C. milleri, C. oleophila, C. oregonensis, C. parapsilosis, C. quercitrusa, C. sake, C. shehatea, C. temnochilae, C. tenuis, C. tropicalis, C. tsuchiyae, C. sinolaborantium, C. sojae, C. viswanathii, and C. utilis.

[0135] As used herein, a “surface protein” of a pathogen is any protein that is located on external surface of the pathogen. The surface protein can be partially or entirely exposed to the external environment (i.e. outer surface). Exemplary of surface proteins are yeast cell wall proteins, such as, for example, a cell wall glycoprotein, such as a mannoprotein. Mannoproteins are generally located in the outermost layer of the cell wall and are highly antigenic.

[0136] As used herein, a mannoprotein is any protein that is modified by the oligosaccharide mannose. Mannoproteins are a major component of yeast cell wall.

[0137] As used herein, a “therapeutic antibody” refers to any antibody that is administered for treatment of an animal, including a human. Such antibodies can be prepared by any known methods for the production of polypeptides, and hence, include, but are not limited to, recombinantly produced antibodies, synthetically produced antibodies, and therapeutic antibodies extracted from cells or tissues and other sources. As isolated from any sources or as produced, therapeutic antibodies can be heterogeneous in length or differ in post-translational modification, such as glycosylation (i.e. carbohydrate content). Heterogeneity of therapeutic antibodies also can differ depending on the source of the therapeutic antibodies. Hence, reference to therapeutic antibodies refers to the heterogeneous population as produced or isolated. When a homogeneous preparation is intended, it will be so-stated. References to therapeutic antibodies herein are to their monomeric, dimeric or other multimeric forms, as appropriate.

[0138] As used herein, the phrase “derived from” when referring to antibody fragments derived from another antibody, such as a monoclonal antibody, refers to the engineering of antibody fragments (e.g., Fab, F(ab′), F(ab′)₂, single-chain Fvs (scFv), Fv, dsFv, diabody, Fd and Fd′ fragments) that retain the binding specificity of the original antibody. Such fragments can be derived by a variety of methods known in the art, including, but not limited to, enzymatic cleavage, chemical crosslinking, recombinant means or combinations thereof. Generally, the derived antibody fragment shares the identical or substantially identical heavy chain variable region (V_{H}) and light chain variable region (V_{L}) of the parent antibody, such that the antibody fragment and the parent antibody bind the same epitope.

[0139] As used herein, a “parent antibody” or “source antibody” refers the to an antibody from which an antibody fragment (e.g., Fab, F(ab′), F(ab′)₂, single-chain Fvs (scFv), Fv, dsFv, diabody, Fd and Fd′ fragments) is derived.

[0140] As used herein, a conjugate or chimeric polypeptide refers to a polypeptide that contains portions from at least two different polypeptides or from two non-contiguous portions of a single polypeptide. Thus, a chimeric polypeptide generally includes a sequence of amino acid residues from all or part of one polypeptide and a sequence of amino acids from all or part of another different polypeptide. The two portions can be linked directly or indirectly via a linker and can be linked via peptide bonds, other covalent bonds or other non-covalent interactions of sufficient strength to maintain the integrity of a substantial portion of the chimeric polypeptide under equilibrium conditions and physiologic conditions, such as in isotonic pH 7 buffered saline. For purposes herein, chimeric polypeptides include those containing all or part of an anti-Candida antibody linked to another polypeptide, such as, for example, a multimerization domain, a heterologous immunoglobulin constant domain or framework region, or a diagnostic or therapeutic polypeptide.

[0141] As used herein, a fusion protein is a polypeptide engineered to contain sequences of amino acids corresponding to two distinct polypeptides, which are joined together, such as by expressing the fusion protein from a vector containing two nucleic acids, encoding the two polypeptides, in close proximity, e.g. adjacent, to one another along the length of the vector. Generally, a fusion protein provided herein refers to a polypeptide that contains a polypeptide having the amino acid sequence of an antibody and a polypeptide or peptide having the amino acid sequence of a heterologous polypeptide or peptide, such as, for example, a diagnostic or therapeutic polypeptide. Accordingly, a fusion protein refers to a chimeric protein containing two or portions from two more proteins or peptides that are linked directly or indirectly via peptide bonds. The two molecules can be adjacent in the construct or separated by a linker, or spacer polypeptide. The spacer can encode a polypeptide that alters the properties of the polypeptide, such as solubility or intracellular trafficking.

[0142] As used herein, “linker” or “spacer” peptide refers to short sequences of amino acids that join two polypeptide sequences (or nucleic acid encoding such an amino acid sequence). “Peptide linker” refers to the short sequence of amino acids joining the two polypeptide sequences. Exemplary of polypeptide linkers are linkers joining a peptide transduction domain to an antibody or linkers joining two antibody chains in a synthetic antibody fragment such as an scFv fragment. Linkers are well-known and any known linkers can be used in the provided methods. Exemplary of polypeptide linkers are (Gly-Ser)ₙ amino acid sequences, with some Glu or Lys residues dispersed throughout to increase solubility. Other exemplary linkers are described herein; any of these and other known linkers can be used with the provided compositions and methods.

[0143] As used herein, humanized antibodies refer to antibodies that are modified to include “human” sequences of amino acids so that administration to a human does not provoke an immune response. A humanized antibody typically contains complementarily determining regions (CDRs) derived from a non-human species immunoglobulin and the remainder of the antibody molecule derived mainly from a human immunoglobulin. Methods for preparation of such antibodies are known. For example, DNA encoding a monoclonal antibody can be altered by recombinant DNA techniques to encode an antibody in which the amino acid composition of the non-variable regions is based on human antibodies. Methods for identifying such regions are known, including computer programs, which are designed for identifying the variable and non-variable regions of immunoglobulins.

[0144] As used herein, idiotype refers to a set of one or more antigenic determinants specific to the variable region of an immunoglobulin molecule.

[0145] As used herein, anti-idiotype antibody refers to an antibody directed against the antigen-specific part of the sequence of an antibody or T cell receptor. In principle an anti-idiotype antibody inhibits a specific immune response.

[0146] As used herein, an Ig domain is a domain, recognized as such by those in the art that is distinguished by a structure, called the Immunoglobulin (Ig) fold, which contains two beta-pleated sheets, each containing anti-parallel beta strands of amino acids connected by loops. The two beta sheets in the Ig fold are sandwiched together by hydrophobic interactions and a conserved intra-chain disulfide bond. Individual immunoglobulin domains within an antibody chain further can be distinguished based on function. For example, a light chain contains one variable region domain (V_{L}) and one constant region domain (C_{L}), while a heavy chain contains one variable region domain (V_{H}) and three or four constant region domains (C_{H}). Each V_{L}, C_{L}, V_{H}, and C_{H} domain is an example of an immunoglobulin domain.

[0147] As used herein, a variable domain or variable region is a specific Ig domain of an antibody heavy or light chain that contains a sequence of amino acids that varies among different antibodies. Each light chain and each heavy chain has one variable region domain, V_{L} and V_{H}, respectively. The variable domains provide antigen specificity, and thus are responsible for antigen recognition. Each variable region contains CDRs that are part of the antigen-binding site domain and framework regions (FRs).

[0148] As used herein, “antigen-binding domain,” “antigen-binding site,” “antigen combining site” and “antibody combining site” are used synonymously to refer to a domain within an antibody that recognizes and physically interacts with cognate antigen. A native conventional full-length antibody molecule has two conventional antigen-binding sites, each containing portions of a heavy chain variable region and portions of a light chain variable region. A conventional antigen-binding site contains the loops that connect the anti-parallel beta strands within the variable region domains. The antigen combining sites can contain other portions of the variable region domains. Each conventional antigen-binding site contains three hypervariable regions from the heavy chain and three hypervariable regions from the light chain. The hypervariable regions also are called complementarity-determining regions (CDRs). In one example, a domain-exchanged antibody further contains one or more non-conventional antibody combining sites formed by the interface between the two heavy chain variable regions. In this example, the domain-exchanged antibody contains two conventional and at least one non-conventional antibody combining site.

[0149] As used herein, an “antigen binding” portion or region of an antibody is a portion/region that contains at least the antibody combining site (either conventional or non-conventional) or a portion of the antibody combining site that retains the antigen specificity of the corresponding full-length antibody (e.g. a V_{H} portion of the antibody combining site).

[0150] As used herein, a non-conventional antibody combining site, antigen binding site, or antigen combining site refers to domain within an antibody that recognizes and physically interacts with cognate antigen but does not contain the conventional portions of one heavy chain variable region and one light chain variable region. Exemplary of non-conventional antibody combining sites is the non-conventional site comprised of regions of the two heavy chain variable regions in a domain-exchanged antibody.

[0151] As used herein, “hypervariable region,” “HV,” “complementarity-determining region” and “CDR” and “antibody CDR” are used interchangeably to refer to one of a plurality of portions within each variable region that together form an antigen-binding site of an antibody. Each variable region domain contains three CDRs, named CDR1, CDR2 and CDR3. The three CDRs are non-contiguous along the linear amino acid sequence, but are proximate in the folded polypeptide. The CDRs are located within the loops that join the parallel strands of the beta sheets of the variable domain. As described herein, one of skill in the art knows and can identify the CDRs based on Kabat or Chothia numbering (see e.g., Kabat, E. A. et al. (1991) Sequences of Proteins of Immunological Interest, Fifth Edition, U.S. Department of Health and Human Services, NIH Publication No. 91-3242, and Chothia; C. et al. (1987) J. Mol. Biol. 196:901-917).

[0152] As used herein, framework regions (FRs) are the domains within the antibody variable region domains that are located within the beta sheets; the FR regions are comparatively more conserved, in terms of their amino acid sequences, than the hypervariable regions.

[0153] As used herein, a “constant region” domain is a domain in an antibody heavy or light chain that contains a sequence of amino acids that is comparatively more conserved than that of the variable region domain. In conventional full-length antibody molecules, each light chain has a single light chain constant region (C_{L}) domain and each heavy chain contains one or more heavy chain constant region (C_{H}) domains, which include, C_{H}1, C_{H}2, C_{H}3 and C_{H}4. Full-length IgA, IgD and IgG isotypes contain C_{H}1, C_{H}2 C_{H}3 and a hinge region, while IgE and IgM contain C_{H}1, C_{H}2, C_{H}3 and C_{H}4. C_{H}1 and C_{L} domains extend the Fab arm of the antibody molecule, thus contributing to the interaction with antigen and rotation of the antibody arms. Antibody constant regions can serve effector functions, such as, but not limited to, clearance of antigens, pathogens and toxins to which the antibody specifically binds, e.g. through interactions with various cells, biomolecules and tissues.

[0154] As used herein, the term “epitope” refers to any antigenic determinant on an antigen to which the paratope of an antibody binds. Epitopic determinants typically comprise chemically active surface groupings of molecules such as amino acids or sugar side chains and typically have specific three dimensional structural characteristics, as well as specific charge characteristics. For example, 2G12 recognizes an α1→2 mannose epitope on HIV gp120. Similarly, 2G12 recognizes a similar α1-2-linked mannose epitope on Candida.

[0155] As used herein, “an epitope presented on Candida” refers to an antigenic determinant on the cell wall surface of a Candida. Antigenic determinants presented on Candida include, but are not limited to, mannoproteins, glucans and integrins. For example, Candida contains mannoproteins expressed on the cell surface that contain β-1,3-glucans, β-1,6-glucans, α1→6 mannans and α1→2 mannans. An exemplary epitope presented on Candida are al mannan oligosaccharides.

[0156] As used herein, a binding property is a characteristic of a molecule, e.g. a polypeptide, relating to whether or not, and how, it binds one or more binding partners. Binding properties include ability to bind the binding partner(s), the affinity with which it binds to the binding partner (e.g. high affinity), the avidity with which it binds to the binding partner, the strength of the bond with the binding partner and specificity for binding with the binding partner.

[0157] As used herein, affinity describes the strength of the interaction between two or more molecules, such as binding partners, typically the strength of the noncovalent interactions between two binding partners. The affinity of an antibody or antigen-binding fragment thereof for an antigen epitope is the measure of the strength of the total noncovalent interactions between a single antibody combining site and the epitope. Low-affinity antibody-antigen interaction is weak, and the molecules tend to dissociate rapidly, while high affinity antibody-antigen-binding is strong and the molecules remain bound for a longer amount of time. Methods for calculating affinity are well known, such as methods for determining association/dissociation constants. Affinity can be estimated empirically or affinities can be determined comparatively, e.g. by comparing the affinity of one antibody and another antibody for a particular antigen.

[0158] As used herein, a form of an antibody refers to particular structure of an antibody. Antibodies herein include full length and antigen binding forms, such as, for example, a Fab fragment, a full-length IgG, a domain-exchanged Fab fragment, a domain-exchanged IgG, or other antibody fragment or domain-exchanged fragment. Thus, a Fab is a particular form of an antibody.

[0159] Reference to a “corresponding form” of an antibody means that when comparing a property of two antibodies, the property is compared using the same form of the antibody. For example, if its stated that a first antibody that has greater affinity for Candida compared to the affinity of the corresponding form of a second antibody, that means that a particular form, such as a Fab of that antibody has greater affinity compared to the Fab form of the second antibody.

[0160] As used herein, antibody avidity refers to the strength of multiple interactions between a multivalent antibody and its cognate antigen, such as with antibodies containing multiple binding sites associated with an antigen with repeating epitopes or an epitope array. A high avidity antibody has a higher strength of such interactions compared with a low avidity antibody.

[0161] As used herein, “bind” refers to the participation of a molecule in any attractive interaction with another molecule, resulting in a stable association in which the two molecules are in close proximity to one another. Binding includes, but is not limited to, non-covalent bonds, covalent bonds (such as reversible and irreversible covalent bonds), and includes interactions between molecules such as, but not limited to, proteins, nucleic acids, carbohydrates, lipids, and small molecules, such as chemical compounds including drugs. Exemplary of bonds are antibody-antigen interactions and receptor-ligand interactions. When an antibody “binds” a particular antigen, bind refers to the specific recognition of the antigen by the antibody, through cognate antibody-antigen interaction, at antibody combining sites. Binding also can include association of multiple chains of a polypeptide, such as antibody chains which interact through disulfide bonds.

[0162] As used herein, “specifically bind” or “immunospecifically bind” with respect to an antibody or antigen-binding fragment thereof are used interchangeably herein and refer to the ability of the antibody or antigen-binding fragment to form one or more noncovalent bonds with a cognate antigen, by noncovalent interactions between the antibody combining site(s) of the antibody and the antigen. The antigen can be an isolated antigen or presented on the surface of a pathogen, such as a yeast cell (e.g. Candida). Typically, an antibody that immunospecifically binds (or that specifically binds) to a yeast cell is one that binds to a surface antigen on the yeast with an affinity constant (Ka) of about or 1×10⁷ M⁻¹ or 1×10⁸ M⁻¹ or greater (or a dissociation constant (K_{d}) of 1×10⁻⁷ M (100 nM) or 1×10⁻⁸ M (10 nM) or less). Affinity constants can be determined by standard kinetic methodology for antibody reactions, for example, immunoassays (e.g. ELISA), or surface plasmon resonance (SPR) of assembled glycolipid monolayers or glycosylated proteins (Luallen et al. (2009) Journal of Virology 83(10):4861-4870). Instrumentation and methods for real time detection and monitoring of binding rates are known and are commercially available (e.g., BiaCore 2000, Biacore AB, Upsala, Sweden and GE Healthcare Life Sciences; Malmqvist (2000) Biochem. Soc. Trans. 27:335). An antibody that immunospecifically binds to a yeast cell can bind to other peptides, polypeptides, or proteins, viruses, or yeast cells with equal or lower binding affinity. Typically, an antibody or antigen-binding fragment thereof provided herein that binds immunospecifically to Candida antigen does not cross-react with other antigens or cross reacts with substantially (at least 10-100 fold) lower affinity for such antigens. A particular antigen, such as a carbohydrate moiety, can be present on multiple glycoproteins, including glycoproteins from different species. For example, the carbohydrate moiety which is recognized by 2G12 is present on multiple glycoproteins, such as, but not limited to, HIV gp120, Candida cell wall mannoproteins, and Saccharomyces cerevisiae Pst1. Antibodies or antigen-binding fragments that immunospecifically bind to a particular Candida antigen (e.g. a carbohydrate moiety present on a Candida mannoprotein) can be identified, for example, by immunoassays, such as radioimmunoassays (RIA), enzyme-linked immunosorbent assays (ELISAs), surface plasmon resonance, or other techniques known to those of skill in the art. An antibody or antigen-binding fragment thereof that immunospecifically binds to an epitope on a Candida antigen typically is one the binds to the epitope (presented on the yeast) with a higher binding affinity than to any cross-reactive epitope as determined using experimental techniques, such as, but not limited to, immunoassays, surface plasmon resonance, or other techniques known to those of skill in the art. The affinity of the antibody for the antigen, such as a carbohydrate moiety, as presented on the surface of a yeast cell can be determined.

[0163] As used herein, the term “surface plasmon resonance” refers to an optical phenomenon that allows for the analysis of real-time interactions by detection of alterations in protein concentrations within a biosensor matrix, for example, using the BiaCore system (GE Healthcare Life Sciences).

[0164] As used herein, “affinity constant” refers to an association constant (Ka) used to measure the affinity of an antibody for an antigen. The higher the affinity constant the greater the affinity of the antibody for the antigen. Affinity constants are expressed in units of reciprocal molarity (i.e. M⁻¹) and can be calculated from the rate constant for the association-dissociation reaction as measured by standard kinetic methodology for antibody reactions (e.g., immunoassays, surface plasmon resonance, or other kinetic interaction assays known in the art).

[0165] As used herein, “off-rate” when referring to an antibody, refers to the dissociation rate constant (k_{off}), or rate at which the antibody dissociates from bound antigen. Off-rate can be compared to another antibody, for example, “low off rate” of a variant antibody polypeptide or modified antibody polypeptide can refer to an off-rate that is lower than the off-rate of the target or unmodified antibody.

[0166] As used herein, “on-rate,” when referring to an antibody, refers to the dissociation rate constant (kₒₙ), or rate at which the antibody associates (binds) to its antigen. On-rate can be compared to another antibody, for example, “high on-rate” of a variant antibody polypeptide or modified antibody polypeptide can refer to an on-rate that is greater than the on-rate of the target or unmodified antibody.

[0167] As used herein, the phrase “having the same binding specificity” when used to describe an antibody in reference to another antibody, means that the antibody specifically binds (immunospecifically binds or specifically binds to the yeast cell) to all or a part of the same antigenic epitope as the reference antibody. The epitope can be on the isolated protein (e.g. an isolated yeast cell wall glycoprotein) or expressed on the surface of the yeast. The ability of two antibodies to bind to the same epitope can be determined by known assays in the art such as, for example, surface plasmon resonance assays and antibody competition assays. Typically, antibodies that immunospecifically bind to the same epitope can compete for binding to the epitope, which can be measured, for example, by an in vitro binding competition assay (e.g. competition ELISA), using techniques known the art. Typically, a first antibody that immunospecifically binds to the same epitope as a second antibody can compete for binding to the epitope by about or 30%, 35%, 40%, 45%, 50%, 55%, 60%, 65%, 70%, 75%, 80%, 85%, 90%, 95%, 100%, where the percentage competition is measured ability of the second antibody to displace binding of the first antibody to the epitope. In exemplary competition assays, the antigen is incubated in the presence a predetermined limiting dilution of a labeled antibody (e.g., 50-70% saturation concentration), and serial dilutions of an unlabeled competing antibody. Competition is determined by measuring the binding of the labeled antibody to the antigen for any decreases in binding in the presence of the competing antibody. Variations of such assays, including various labeling techniques and detection methods including, for example, radiometric, fluorescent, enzymatic and colorimetric detection, are known in the art.

[0168] As used herein, “binding partner” refers to a molecule (such as a polypeptide, lipid, glycolipid, nucleic acid molecule, carbohydrate or other molecule), with which another molecule specifically interacts, for example, through covalent or noncovalent interactions, such as the interaction of an antibody with cognate antigen. The binding partner can be naturally or synthetically produced. In one example, desired variant polypeptides are selected using one or more binding partners, for example, using in vitro or in vivo methods. Exemplary of the in vitro methods include selection using a binding partner coupled to a solid support, such as a bead, plate, column, matrix or other solid support; or a binding partner coupled to another selectable molecule, such as a biotin molecule, followed by subsequent selection by coupling the other selectable molecule to a solid support. Typically, the in vitro methods include wash steps to remove unbound polypeptides, followed by elution of the selected variant polypeptide(s). The process can be repeated one or more times in an iterative process to select variant polypeptides from among the selected polypeptides.

[0169] As used herein, a “multivalent” antibody is an antibody containing two or more antigen-binding sites. Multivalent antibodies encompass bivalent, trivalent, tetravalent, pentavalent, hexavalent, heptavalent or higher valency antibodies.

[0170] As used herein, a “monospecific” is an antibody that contains two or more antigen-binding sites, where each antigen-binding site immunospecifically binds to the same epitope.

[0171] As used herein, a “multispecific” antibody is an antibody that contains two or more antigen-binding sites, where at least two of the antigen-binding sites immunospecifically bind to different epitopes.

[0172] As used herein, a “bispecific” antibody is a multispecific antibody that contains two or more antigen-binding sites and can immunospecifically bind to two different epitopes. A “trispecific” antibody is a multispecific antibody that contains three or more antigen-binding sites and can immunospecifically bind to three different epitopes. A “tetraspecific” antibody is a multispecific antibody that contains four or more antigen-binding sites and can immunospecifically bind to four different epitopes, and so on.

[0173] As used herein, a “heterobivalent” antibody is a bispecific antibody that contains two antigen-binding sites, where each antigen-binding site immunospecifically binds to a different epitope.

[0174] As used herein, a “homobivalent” antibody is a monospecific antibody that contains two antigen-binding sites, where each antigen-binding site immunospecifically binds to the same epitope. Homobivalent antibodies include, but are not limited to, conventional full length antibodies, engineered or synthetic full-length antibodies, any multimer of two identical antigen-binding fragments, or any multimer two antigen-binding fragments containing the same antigen-binding domain.

[0175] As used herein, “binds to the same epitope” with reference to two or more antibodies means that the antibodies compete for binding to an antigen and bind to the same, overlapping or encompassing continuous or discontinuous segments of amino acids. Those of skill in the art understand that the phrase “binds to the same epitope” does not necessarily mean that the antibodies bind to exactly the same amino acids. The precise amino acids to which the antibodies bind can differ. For example, a first antibody can bind to a segment of amino acids that is completely encompassed by the segment of amino acids bound by a second antibody. In another example, a first antibody binds one or more segments of amino acids that significantly overlap the one or more segments bound by the second antibody. For the purposes herein, such antibodies are considered to “bind to the same epitope.”

[0176] Antibody competition assays can be used to determine whether an antibody “binds to the same epitope” as another antibody. Such assays are well known on the art. Typically, competition of 70% or more, such as 70%, 71%, 72%, 73%, 74%, 75%, 80%, 85%, 90%, 95% or more, of an antibody known to interact with the epitope by a second antibody under conditions in which the second antibody is in excess and the first saturates all sites, is indicative that the antibodies “bind to the same epitope.” To assess the level of competition between two antibodies, for example, radioimmunoassays or assays using other labels for the antibodies, can be used. For example, an antigen can be incubated with a a saturating amount of a first antibody or antigen-binding fragment thereof conjugated to a labeled compound (e.g., ³H, ¹²⁵I, biotin, or rubidium) in the presence the same amount of a second unlabeled antibody. The amount of labeled antibody that is bound to the antigen in the presence of the unlabeled blocking antibody is then assessed and compared to binding in the absence of the unlabeled blocking antibody. Competition is determined by the percentage change in binding signals in the presence of the unlabeled blocking antibody compared to the absence of the blocking antibody. Thus, if there is a 70% inhibition of binding of the labeled antibody in the presence of the blocking antibody compared to binding in the absence of the blocking antibody, then there is competition between the two antibodies of 70%. Thus, reference to competition between a first and second antibody of 70% or more, such as 70%, 71%, 72%, 73%, 74%, 75%, 80%, 85%, 90%, 95% or more, means that the first antibody inhibits binding of the second antibody (or vice versa) to the antigen by 70%, 71%, 72%, 73%, 74%, 75%, 80%, 85%, 90%, 95% or more (compared to binding of the antigen by the second antibody in the absence of the first antibody). Thus, inhibition of binding of a first antibody to an antigen by a second antibody of 70%, 71%, 72%, 73%, 74%, 75%, 80%, 85%, 90%, 95% or more indicates that the two antibodies bind to the same epitope.

[0177] As used herein, a multimerization domain refers to a sequence of amino acids that promotes stable interaction of a polypeptide molecule with one or more additional polypeptide molecules, each containing a complementary multimerization domain, which can be the same or a different multimerization domain to form a stable multimer with the first domain. Generally, a polypeptide is joined directly or indirectly to the multimerization domain. Exemplary multimerization domains include the immunoglobulin sequences or portions thereof, leucine zippers, hydrophobic regions, hydrophilic regions, and compatible protein-protein interaction domains. The multimerization domain, for example, can be an immunoglobulin constant region or domain, such as, for example, the Fc domain or portions thereof from IgG, including IgG1, IgG2, IgG3 or IgG4 subtypes, IgA, IgE, IgD and IgM and modified forms thereof.

[0178] As used herein, dimerization domains are multimerization domains that facilitate interaction between two polypeptide sequences (such as, but not limited to, antibody chains). Dimerization domains include, but are not limited to, an amino acid sequence containing a cysteine residue that facilitates formation of a disulfide bond between two polypeptide sequences, such as all or part of a full-length antibody hinge region, or one or more dimerization sequences, which are sequences of amino acids known to promote interaction between polypeptides (e.g., leucine zippers, GCN4 zippers). In some examples of the provided methods and compositions, one or more dimerization domains is included in a domain exchanged antibody fragment, in order to promote interaction between chains, and thus stabilize the domain exchanged configuration.

[0179] As used herein, “Fc” or “Fc region” or “Fc domain” refers to a polypeptide containing the constant region of an antibody heavy chain, excluding the first constant region immunoglobulin domain. Thus, Fc refers to the last two constant region immunoglobulin domains of IgA, IgD, and IgE, or the last three constant region immunoglobulin domains of IgE and IgM. Optionally, an Fc domain can include all or part of the flexible hinge N-terminal to these domains. For IgA and IgM, Fc can include the J chain. For an exemplary Fc domain of IgG, Fc contains immunoglobulin domains Cγ2 and Cγ3, and optionally, all or part of the hinge between Cγ1 and Cγ2. The boundaries of the Fc region can vary, but typically, include at least part of the hinge region. In addition, Fc also includes any allelic or species variant or any variant or modified form, such as any variant or modified form that alters the binding to an FcR or alters an Fc-mediated effector function.

[0180] As used herein, a “tag” or an “epitope tag” refers to a sequence of amino acids, typically added to the N- or C-terminus of a polypeptide, such as an antibody provided herein. The inclusion of tags fused to a polypeptide can facilitate polypeptide purification and/or detection. Typically, a tag or tag polypeptide refers to polypeptide that has enough residues to provide an epitope recognized by an antibody or can serve for detection or purification, yet is short enough such that it does not interfere with activity of chimeric polypeptide to which it is linked. The tag polypeptide typically is sufficiently unique so an antibody that specifically binds thereto does not substantially cross-react with epitopes in the polypeptide to which it is linked. Suitable tag polypeptides generally have at least 5 or 6 amino acid residues and usually between about 8-50 amino acid residues, typically between 9-30 residues. The tags can be linked to one or more chimeric polypeptides in a multimer and permit detection of the multimer or its recovery from a sample or mixture. Such tags are well known and can be readily synthesized and designed. Exemplary tag polypeptides include those used for affinity purification and include, His tags, the influenza hemagglutinin (HA) tag polypeptide and its antibody 12CA5, (Field et al. (1988) Mol. Cell. Biol. 8:2159-2165); the c-myc tag and the 8F9, 3C7, 6E10, G4, B7 and 9E10 antibodies thereto (see, e.g., Evan et al. (1985) Molecular and Cellular Biology 5:3610-3616); and the Herpes Simplex virus glycoprotein D (gD) tag and its antibody (Paborsky et al. (1990) Protein Engineering 3:547-553 (1990). An antibody used to detect an epitope-tagged antibody is typically referred to herein as a secondary antibody.

[0181] As used herein, “polypeptide” refers to two or more amino acids covalently joined. The terms “polypeptide” and “protein” are used interchangeably herein.

[0182] As used herein, a “peptide” refers to a polypeptide that is from 2 to about or 40 amino acids in length.

[0183] As used herein, an “amino acid” is an organic compound containing an amino group and a carboxylic acid group. A polypeptide contains two or more amino acids.

[0184] For purposes herein, amino acids contained in the antibodies provided include the twenty naturally-occurring amino acids (Table 1), non-natural amino acids, and amino acid analogs (e.g., amino acids wherein the α-carbon has a side chain). As used herein, the amino acids, which occur in the various amino acid sequences of polypeptides appearing herein, are identified according to their well-known, three-letter or one-letter abbreviations (see Table 1). The nucleotides, which occur in the various nucleic acid molecules and fragments, are designated with the standard single-letter designations used routinely in the art.

[0185] As used herein, “amino acid residue” refers to an amino acid formed upon chemical digestion (hydrolysis) of a polypeptide at its peptide linkages. The amino acid residues described herein are generally in the “L” isomeric form. Residues in the “D” isomeric form can be substituted for any L-amino acid residue, as long as the desired functional property is retained by the polypeptide. NH₂ refers to the free amino group present at the amino terminus of a polypeptide. COOH refers to the free carboxy group present at the carboxyl terminus of a polypeptide. In keeping with standard polypeptide nomenclature described in J. Biol. Chem., 243:3557-59 (1968) and adopted at 37 C.F.R. §§.1.821-1.822, abbreviations for amino acid residues are shown in Table 1:

TABLE 1
Table of Correspondence

SYMBOL

| 1-Letter | 3-Letter | AMINO ACID |
|---|---|---|
| Y | Tyr | Tyrosine |
| G | Gly | Glycine |
| F | Phe | Phenylalanine |
| M | Met | Methionine |
| A | Ala | Alanine |
| S | Ser | Serine |
| I | Ile | Isoleucine |
| L | Leu | Leucine |
| T | Thr | Threonine |
| V | Val | Valine |
| P | Pro | Proline |
| K | Lys | Lysine |
| H | His | Histidine |
| Q | Gln | Glutamine |
| E | Glu | Glutamic acid |
| Z | Glx | Glutamic Acid and/or Glutamine |
| W | Trp | Tryptophan |
| R | Arg | Arginine |
| D | Asp | Aspartic acid |
| N | Asn | Asparagine |
| B | Asx | Aspartic Acid and/or Asparagine |
| C | Cys | Cysteine |
| X | Xaa | Unknown or other |

[0186] All sequences of amino acid residues represented herein by a formula have a left to right orientation in the conventional direction of amino-terminus to carboxyl-terminus. In addition, the phrase “amino acid residue” is defined to include the amino acids listed in the Table of Correspondence (Table 1), modified, non-natural and unusual amino acids. Furthermore, a dash at the beginning or end of an amino acid residue sequence indicates a peptide bond to a further sequence of one or more amino acid residues or to an amino-terminal group such as NH₂ or to a carboxyl-terminal group such as COOH.

[0187] In a peptide or protein, suitable conservative substitutions of amino acids are known to those of skill in this art and generally can be made without altering a biological activity of a resulting molecule. Those of skill in this art recognize that, in general, single amino acid substitutions in non-essential regions of a polypeptide do not substantially alter biological activity (see, e.g., Watson et al., Molecular Biology of the Gene, 4th Edition, 1987, The Benjamin/Cummings Pub. co., p. 224).

[0188] Such substitutions can be made in accordance with those set forth in Table 2 as follows:

TABLE 2

| Original | Conservative |
|---|---|
| residue | substitution |
| Ala (A) | Gly; Ser |
| Arg (R) | Lys |
| Asn (N) | Gln; His |
| Cys (C) | Ser |
| Gln (Q) | Asn |
| Glu (E) | Asp |
| Gly (G) | Ala; Pro |
| His (H) | Asn; Gln |
| Ile (I) | Leu; Val |
| Leu (L) | Ile; Val |
| Lys (K) | Arg; Gln; Glu |
| Met (M) | Leu; Tyr; Ile |
| Phe (F) | Met; Leu; Tyr |
| Ser (S) | Thr |
| Thr (T) | Ser |
| Trp (W) | Tyr |
| Tyr (Y) | Trp; Phe |
| Val (V) | Ile; Leu |

[0189] Other substitutions also are permissible and can be determined empirically or in accord with other known conservative or non-conservative substitutions.

[0190] As used herein, “naturally occurring amino acids” refer to the 20 L-amino acids that occur in polypeptides.

[0191] As used herein, the term “non-natural amino acid” refers to an organic compound that has a structure similar to a natural amino acid but has been modified structurally to mimic the structure and reactivity of a natural amino acid. Non-naturally occurring amino acids thus include, for example, amino acids or analogs of amino acids other than the 20 naturally occurring amino acids and include, but are not limited to, the D-isostereomers of amino acids. Exemplary non-natural amino acids are known to those of skill in the art, and include, but are not limited to, 2-Aminoadipic acid (Aad), 3-Aminoadipic acid (Baad), β-alanine/β-Amino-propionic acid (Bala), 2-Aminobutyric acid (Abu), 4-Aminobutyric acid/piperidinic acid (4Abu), 6-Aminocaproic acid (Acp), 2-Aminoheptanoic acid (Ahe), 2-Aminoisobutyric acid (Aib), 3-Aminoisobutyric acid (Baib), 2-Aminopimelic acid (Apm), 2,4-Diaminobutyric acid (Dbu), Desmosine (Des), 2,2′-Diaminopimelic acid (Dpm), 2,3-Diaminopropionic acid (Dpr), N-Ethyl glycine (EtGly), N-Ethylasparagine (EtAsn), Hydroxylysine (Hyl), allo-Hydroxylysine (Ahyl), 3-Hydroxyproline (3Hyp), 4-Hydroxyproline (4Hyp), Isodesmosine (Ide), allo-Isoleucine (Aile), N-Methylglycine, sarcosine (MeGly), N-Methylisoleucine (MeIle), 6-N-Methyllysine (MeLys), N-Methylvaline (MeVal), Norvaline (Nva), Norleucine (Nle) and Ornithine (Orn).

[0192] As used herein, a “native polypeptide” or a “native nucleic acid” molecule is a polypeptide or nucleic acid molecule, respectively, that can be found in nature. A native polypeptide or nucleic acid molecule can be the wild-type form of a polypeptide or nucleic acid molecule. A native polypeptide or nucleic acid molecule can be the predominant form of the polypeptide, or any allelic or other natural variant thereof. The variant polypeptides and nucleic acid molecules provided herein can have modifications compared to native polypeptides and nucleic acid molecules.

[0193] As used herein, the wild-type form of a polypeptide or nucleic acid molecule is a form encoded by a gene or by a coding sequence encoded by the gene. Typically, a wild-type form of a gene, or molecule encoded thereby, does not contain mutations or other modifications that alter function or structure. The term wild-type also encompasses forms with allelic variation as occurs among and between species. As used herein, a predominant form of a polypeptide or nucleic acid molecule refers to a form of the molecule that is the major form produced from a gene. A “predominant form” varies from source to source. For example, different cells or tissue types can produce different forms of polypeptides, for example, by alternative splicing and/or by alternative protein processing. In each cell or tissue type, a different polypeptide can be a “predominant form.”

[0194] As used herein, an “allelic variant” or “allelic variation” references any of two or more alternative forms of a gene occupying the same chromosomal locus. Allelic variation arises naturally through mutation, and can result in phenotypic polymorphism within populations. Gene mutations can be silent (no change in the encoded polypeptide) or can encode polypeptides having altered amino acid sequence. The term “allelic variant” also is used herein to denote a protein encoded by an allelic variant of a gene. Typically the reference form of the gene encodes a wild type form and/or predominant form of a polypeptide from a population or single reference member of a species. Typically, allelic variants, which include variants between and among species typically have at least or about 80%, 85%, 90%, 95% or greater amino acid identity with a wild type and/or predominant form from the same species; the degree of identity depends upon the gene and whether comparison is interspecies or intraspecies. Generally, intraspecies allelic variants have at least or about 80%, 85%, 90% or 95% identity or greater with a wild type and/or predominant form, including 96%, 97%, 98%, 99% or greater identity with a wild type and/or predominant form of a polypeptide. Reference to an allelic variant herein generally refers to variations n proteins among members of the same species.

[0195] As used herein, “allele,” which is used interchangeably herein with “allelic variant” refers to alternative forms of a gene or portions thereof. Alleles occupy the same locus or position on homologous chromosomes. When a subject has two identical alleles of a gene, the subject is said to be homozygous for that gene or allele. When a subject has two different alleles of a gene, the subject is said to be heterozygous for the gene. Alleles of a specific gene can differ from each other in a single nucleotide or several nucleotides, and can include substitutions, deletions and insertions of nucleotides. An allele of a gene also can be a form of a gene containing a mutation.

[0196] As used herein, “species variants” refer to variants in polypeptides among different species, including different mammalian species, such as mouse and human, and species of microorganisms, such as yeast and bacteria.

[0197] As used herein, a polypeptide “domain” is a part of a polypeptide (a sequence of three or more, generally 5, 10 or more amino acids) that is a structurally and/or functionally distinguishable or definable. Exemplary of a polypeptide domain is a part of the polypeptide that can form an independently folded structure within a polypeptide made up of one or more structural motifs (e.g. combinations of alpha helices and/or beta strands connected by loop regions) and/or that is recognized by a particular functional activity, such as enzymatic activity, dimerization or antigen-binding. A polypeptide can have one or more, typically more than one, distinct domains. For example, the polypeptide can have one or more structural domains and one or more functional domains. A single polypeptide domain can be distinguished based on structure and function. A domain can encompass a contiguous linear sequence of amino acids. Alternatively, a domain can encompass a plurality of non-contiguous amino acid portions, which are non-contiguous along the linear sequence of amino acids of the polypeptide. Typically, a polypeptide contains a plurality of domains. For example, each heavy chain and each light chain of an antibody molecule contains a plurality of immunoglobulin (Ig) domains, each about 110 amino acids in length.

[0198] As used herein, a “property” of a polypeptide, such as an antibody, refers to any property exhibited by a polypeptide, including, but not limited to, binding specificity, structural configuration or conformation, protein stability, resistance to proteolysis, conformational stability, thermal tolerance, and tolerance to pH conditions. Changes in properties can alter an “activity” of the polypeptide. For example, a change in the binding specificity of the antibody polypeptide can alter the ability to bind an antigen, and/or various binding activities, such as affinity or avidity, or in vivo activities of the polypeptide.

[0199] As used herein, an “activity” or a “functional activity” of a polypeptide, such as an antibody, refers to any activity exhibited by the polypeptide. Such activities can be empirically determined. Exemplary activities include, but are not limited to, ability to interact with a biomolecule, for example, through antigen-binding, DNA binding, ligand binding, or dimerization, enzymatic activity, for example, kinase activity or proteolytic activity. For an antibody (including antibody fragments), activities include, but are not limited to, the ability to specifically bind a particular antigen, affinity of antigen-binding (e.g. high or low affinity), avidity of antigen-binding (e.g. high or low avidity), on-rate, off-rate, effector functions, such as the ability to promote antigen neutralization or clearance, and in vivo activities, such as the ability to prevent infection or invasion of a pathogen, or to promote clearance, or to penetrate a particular tissue or fluid or cell in the body. Activity can be assessed in vitro or in vivo using recognized assays, such as ELISA, flow cytometry, surface plasmon resonance or equivalent assays to measure on- or off-rate, immunohistochemistry and immunofluorescence histology and microscopy, cell-based assays, flow cytometry and binding assays (e.g. panning assays). For example, for an antibody polypeptide, activities can be assessed by measuring binding affinities, avidities, and/or binding coefficients (e.g. for on-/off-rates), and other activities in vitro or by measuring various effects in vivo, such as immune effects, e.g. antigen clearance, penetration or localization of the antibody into tissues, protection from disease, e.g. infection, serum or other fluid antibody titers, or other assays that are well known in the art. The results of such assays that indicate that a polypeptide exhibits an activity can be correlated to activity of the polypeptide in vivo, in which in vivo activity can be referred to as therapeutic activity, or biological activity. Activity of a modified polypeptide can be any level of percentage of activity of the unmodified polypeptide, including but not limited to, 1% of the activity, 2%, 3%, 4%, 5%, 10%, 20%, 30%, 40%, 50%, 60%, 70%, 80%, 90%, 91%, 92%, 93%, 94%, 95%, 96%, 97%, 98%, 99%, 100%, 200%, 300%, 400%, 500%, or more of activity compared to the unmodified polypeptide. Assays to determine functionality or activity of modified (e.g. variant) antibodies are well known in the art.

[0200] As used herein. “therapeutic activity” refers to the in vivo activity of a therapeutic polypeptide. Generally, the therapeutic activity is the activity that is used to treat a disease or condition. Therapeutic activity of a modified polypeptide can be any level of percentage of therapeutic activity of the unmodified polypeptide, including but not limited to, 1% of the activity, 2%, 3%, 4%, 5%, 10%, 20%, 30%, 40%, 50%, 60%, 70%, 80%, 90%, 91%, 92%, 93%, 94%, 95%, 96%, 97%, 98%, 99%, 100%, 200%, 300%, 400%, 500%, or more of therapeutic activity compared to the unmodified polypeptide.

[0201] As used herein, “exhibits at least one activity” or “retains at least one activity” refers to the activity exhibited by a modified polypeptide, such as a variant polypeptide produced according to the provided methods, such as a modified, e.g. variant antibody or other therapeutic polypeptide (e.g. a modified anti-Candida antibody), compared to the target or unmodified polypeptide, that does not contain the modification. A modified, or variant, polypeptide that retains an activity of a target polypeptide can exhibit improved activity or maintain the activity of the unmodified polypeptide. In some instances, a modified, or variant, polypeptide can retain an activity that is increased compared to an target or unmodified polypeptide. In some cases, a modified, or variant, polypeptide can retain an activity that is decreased compared to an unmodified or target polypeptide. Activity of a modified, or variant, polypeptide can be any level of percentage of activity of the unmodified or target polypeptide, including but not limited to, 1% of the activity, 2%, 3%, 4%, 5%, 10%, 20%, 30%, 40%, 50%, 60%, 70%, 80%, 90%, 91%, 92%, 93%, 94%, 95%, 96%, 97%, 98%, 99%, 100%, 200%, 300%, 400%, 500%, or more activity compared to the unmodified or target polypeptide. In other embodiments, the change in activity is at least about 2 times, 3 times, 4 times, 5 times, 6 times, 7 times, 8 times, 9 times, 10 times, 20 times, 30 times, 40 times, 50 times, 60 times, 70 times, 80 times, 90 times, 100 times, 200 times, 300 times, 400 times, 500 times, 600 times, 700 times, 800 times, 900 times, 1000 times, or more times greater than unmodified or target polypeptide. Assays for retention of an activity depend on the activity to be retained. Such assays can be performed in vitro or in vivo. Activity can be measured, for example, using assays known in the art and described in the Examples below for activities such as but not limited to ELISA and panning assays. Activities of a modified, or variant, polypeptide compared to an unmodified or target polypeptide also can be assessed in terms of an in vivo therapeutic or biological activity or result following administration of the polypeptide.

[0202] As used herein, “screening” refers to identification or selection of an antibody or portion thereof from a plurality of antibodies, such as a collection or library of antibodies and/or portions thereof, based on determination of the activity or property of an antibody or portion thereof. Screening can be performed in any of a variety of ways and generally involves containing members of the collection with an antigen and assessing a property or activity, for example, by assays assessing direct binding (e.g. binding affinity) of the antibody to a target protein or by functional assays assessing modulation of an activity of a target protein.

[0203] As used herein, the term “assessing” is intended to include quantitative and qualitative determination in the sense of obtaining an absolute value for the activity of a protease, or a domain thereof, present in the sample, and also of obtaining an index, ratio, percentage, visual, or other value indicative of the level of the activity. Assessment can be direct or indirect and the chemical species actually detected need not of course be the proteolysis product itself but can for example be a derivative thereof or some further substance. For example, detection of a cleavage product of a complement protein, such as by SDS-PAGE and protein staining with Coomassie blue.

[0204] As used herein, the term “nucleic acid” refers to at least two linked nucleotides or nucleotide derivatives, including a deoxyribonucleic acid (DNA) and a ribonucleic acid (RNA), joined together, typically by phosphodiester linkages. Also included in the term “nucleic acid” are analogs of nucleic acids such as peptide nucleic acid (PNA), phosphorothioate DNA, and other such analogs and derivatives or combinations thereof. Nucleic acids also include DNA and RNA derivatives containing, for example, a nucleotide analog or a “backbone” bond other than a phosphodiester bond, for example, a phosphotriester bond, a phosphoramidate bond, a phosphorothioate bond, a thioester bond, or a peptide bond (peptide nucleic acid). The term also includes, as equivalents, derivatives, variants and analogs of either RNA or DNA made from nucleotide analogs, single (sense or antisense) and double-stranded nucleic acids. Deoxyribonucleotides include deoxyadenosine, deoxycytidine, deoxyguanosine and deoxythymidine. For RNA, the uracil base is uridine.

[0205] Nucleic acids can contain nucleotide analogs, including, for example, mass modified nucleotides, which allow for mass differentiation of nucleic acid molecules; nucleotides containing a detectable label such as a fluorescent, radioactive, luminescent or chemiluminescent label, which allow for detection of a nucleic acid molecule; or nucleotides containing a reactive group such as biotin or a thiol group, which facilitates immobilization of a nucleic acid molecule to a solid support. A nucleic acid also can contain one or more backbone bonds that are selectively cleavable, for example, chemically, enzymatically or photolytically cleavable. For example, a nucleic acid can include one or more deoxyribonucleotides, followed by one or more ribonucleotides, which can be followed by one or more deoxyribonucleotides, such a sequence being cleavable at the ribonucleotide sequence by base hydrolysis. A nucleic acid also can contain one or more bonds that are relatively resistant to cleavage, for example, a chimeric oligonucleotide primer, which can include nucleotides linked by peptide nucleic acid bonds and at least one nucleotide at the 3′ end, which is linked by a phosphodiester bond or other suitable bond, and is capable of being extended by a polymerase. Peptide nucleic acid sequences can be prepared using well-known methods (see, for example, Weiler et al. (1997) Nucleic Acids Res. 25:2792-2799).

[0206] As used herein, the terms “polynucleotide” and “nucleic acid molecule” refer to an oligomer or polymer containing at least two linked nucleotides or nucleotide derivatives, including a deoxyribonucleic acid (DNA) and a ribonucleic acid (RNA), joined together, typically by phosphodiester linkages. Polynucleotides also include DNA and RNA derivatives containing, for example, a nucleotide analog or a “backbone” bond other than a phosphodiester bond, for example, a phosphotriester bond, a phosphoramidate bond, a phosphorothioate bond, a thioester bond, or a peptide bond (peptide nucleic acid). Polynucleotides (nucleic acid molecules), include single-stranded and/or double-stranded polynucleotides, such as deoxyribonucleic acid (DNA), and ribonucleic acid (RNA) as well as analogs or derivatives of either RNA or DNA. The term also includes, as equivalents, derivatives, variants and analogs of either RNA or DNA made from nucleotide analogs, single (sense or antisense) and double-stranded polynucleotides. Deoxyribonucleotides include deoxyadenosine, deoxycytidine, deoxyguanosine and deoxythymidine. For RNA, the uracil base is uridine. Polynucleotides can contain nucleotide analogs, including, for example, mass modified nucleotides, which allow for mass differentiation of polynucleotides; nucleotides containing a detectable label such as a fluorescent, radioactive, luminescent or chemiluminescent label, which allow for detection of a polynucleotide; or nucleotides containing a reactive group such as biotin or a thiol group, which facilitates immobilization of a polynucleotide to a solid support. A polynucleotide also can contain one or more backbone bonds that are selectively cleavable, for example, chemically, enzymatically or photolytically cleavable. For example, a polynucleotide can include one or more deoxyribonucleotides, followed by one or more ribonucleotides, which can be followed by one or more deoxyribonucleotides, such a sequence being cleavable at the ribonucleotide sequence by base hydrolysis. A polynucleotide also can contain one or more bonds that are relatively resistant to cleavage, for example, a chimeric oligonucleotide primer, which can include nucleotides linked by peptide nucleic acid bonds and at least one nucleotide at the 3′ end, which is linked by a phosphodiester bond or other suitable bond, and is capable of being extended by a polymerase. Peptide nucleic acid sequences can be prepared using well-known methods (see, for example, Weiler et al. (1997) Nucleic Acids Res. 25:2792-2799). Exemplary of the nucleic acid molecules (polynucleotides) provided herein are oligonucleotides, including synthetic oligonucleotides, oligonucleotide duplexes, primers, including fill-in primers, and oligonucleotide duplex cassettes.

[0207] As used herein, a “DNA construct” is a single or double stranded, linear or circular DNA molecule that contains segments of DNA combined and juxtaposed in a manner not found in nature. DNA constructs exist as a result of human manipulation, and include clones and other copies of manipulated molecules.

[0208] As used herein, a genetic element refers to a gene, or any region thereof, that encodes a polypeptide or protein or region thereof. In some examples, a genetic element encodes a fusion protein.

[0209] As used herein, regulatory region of a nucleic acid molecule means a cis-acting nucleotide sequence that influences expression, positively or negatively, of an operatively linked gene. Regulatory regions include sequences of nucleotides that confer inducible (i.e., require a substance or stimulus for increased transcription) expression of a gene. When an inducer is present or at increased concentration, gene expression can be increased. Regulatory regions also include sequences that confer repression of gene expression (i.e., a substance or stimulus decreases transcription). When a repressor is present or at increased concentration gene expression can be decreased. Regulatory regions are known to influence, modulate or control many in vivo biological activities including cell proliferation, cell growth and death, cell differentiation and immune modulation. Regulatory regions typically bind to one or more trans-acting proteins, which results in either increased or decreased transcription of the gene.

[0210] Particular examples of gene regulatory regions are promoters and enhancers. Promoters are sequences located around the transcription or translation start site, typically positioned 5′ of the translation start site. Promoters usually are located within 1 Kb of the translation start site, but can be located further away, for example, 2 Kb, 3 Kb, 4 Kb, 5 Kb or more, up to and including 10 Kb. Enhancers are known to influence gene expression when positioned 5′ or 3′ of the gene, or when positioned in or a part of an exon or an intron. Enhancers also can function at a significant distance from the gene, for example, at a distance from about 3 Kb, 5 Kb, 7 Kb, 10 Kb, 15 Kb or more.

[0211] Regulatory regions also include, in addition to promoter regions, sequences that facilitate translation, splicing signals for introns, maintenance of the correct reading frame of the gene to permit in-frame translation of mRNA and, stop codons, leader sequences and fusion partner sequences, internal ribosome binding site (IRES) elements for the creation of multigene, or polycistronic, messages, polyadenylation signals to provide proper polyadenylation of the transcript of a gene of interest and stop codons, and can be optionally included in an expression vector.

[0212] As used herein, “operably linked” with reference to nucleic acid sequences, regions, elements or domains means that the nucleic acid regions are functionally related to each other. For example, nucleic acid encoding a leader peptide can be operably linked to nucleic acid encoding a polypeptide, whereby the nucleic acids can be transcribed and translated to express a functional fusion protein, wherein the leader peptide effects secretion of the fusion polypeptide. In some instances, the nucleic acid encoding a first polypeptide (e.g. a leader peptide) is operably linked to nucleic acid encoding a second polypeptide and the nucleic acids are transcribed as a single mRNA transcript, but translation of the mRNA transcript can result in one of two polypeptides being expressed. For example, an amber stop codon can be located between the nucleic acid encoding the first polypeptide and the nucleic acid encoding the second polypeptide, such that, when introduced into a partial amber suppressor cell, the resulting single mRNA transcript can be translated to produce either a fusion protein containing the first and second polypeptides, or can be translated to produce only the first polypeptide. In another example, a promoter can be operably linked to nucleic acid encoding a polypeptide, whereby the promoter regulates or mediates the transcription of the nucleic acid.

[0213] As used herein, “synthetic,” with reference to, for example, a synthetic nucleic acid molecule or a synthetic gene or a synthetic peptide refers to a nucleic acid molecule or polypeptide molecule that is produced by recombinant methods and/or by chemical synthesis methods.

[0214] As used herein, production by recombinant means by using recombinant DNA methods means the use of the well known methods of molecular biology for expressing proteins encoded by cloned DNA.

[0215] As used herein, “expression” refers to the process by which polypeptides are produced by transcription and translation of polynucleotides. The level of expression of a polypeptide can be assessed using any method known in art, including, for example, methods of determining the amount of the polypeptide produced from the host cell. Such methods can include, but are not limited to, quantitation of the polypeptide in the cell lysate by ELISA, Coomassie blue staining following gel electrophoresis, Lowry protein assay and Bradford protein assay.

[0216] As used herein, a “host cell” is a cell that is used in to receive, maintain, reproduce and amplify a vector. A host cell also can be used to express the polypeptide encoded by the vector. The nucleic acid contained in the vector is replicated when the host cell divides, thereby amplifying the nucleic acids. In one example, the host cell is a genetic package, which can be induced to express the variant polypeptide on its surface. In another example, the host cell is infected with the genetic package. For example, the host cells can be phage-display compatible host cells, which can be transformed with phage or phagemid vectors and accommodate the packaging of phage expressing fusion proteins containing the variant polypeptides.

[0217] As used herein, a “vector” is a replicable nucleic acid from which one or more heterologous proteins can be expressed when the vector is transformed into an appropriate host cell. Reference to a vector includes those vectors into which a nucleic acid encoding a polypeptide or fragment thereof can be introduced, typically by restriction digest and ligation. Reference to a vector also includes those vectors that contain nucleic acid encoding a polypeptide. The vector is used to introduce the nucleic acid encoding the polypeptide into the host cell for amplification of the nucleic acid or for expression/display of the polypeptide encoded by the nucleic acid. The vectors typically remain episomal, but can be designed to effect integration of a gene or portion thereof into a chromosome of the genome. Also contemplated are vectors that are artificial chromosomes, such as yeast artificial chromosomes and mammalian artificial chromosomes. Selection and use of such vehicles are well known to those of skill in the art.

[0218] As used herein, a vector also includes “virus vectors” or “viral vectors.” Viral vectors are engineered viruses that are operatively linked to exogenous genes to transfer (as vehicles or shuttles) the exogenous genes into cells.

[0219] As used herein, an “expression vector” includes vectors capable of expressing DNA that is operatively linked with regulatory sequences, such as promoter regions, that are capable of effecting expression of such DNA fragments. Such additional segments can include promoter and terminator sequences, and optionally can include one or more origins of replication, one or more selectable markers, an enhancer, a polyadenylation signal, and the like. Expression vectors are generally derived from plasmid or viral DNA, or can contain elements of both. Thus, an expression vector refers to a recombinant DNA or RNA construct, such as a plasmid, a phage, recombinant virus or other vector that, upon introduction into an appropriate host cell, results in expression of the cloned DNA. Appropriate expression vectors are well known to those of skill in the art and include those that are replicable in eukaryotic cells and/or prokaryotic cells and those that remain episomal or those which integrate into the host cell genome.

[0220] As used herein, the terms “oligonucleotide” and “oligo” are used synonymously. Oligonucleotides are polynucleotides that contain a limited number of nucleotides in length. Those in the art recognize that oligonucleotides generally are less than at or about two hundred fifty, typically less than at or about two hundred, typically less than at or about one hundred, nucleotides in length. Typically, the oligonucleotides are synthetic oligonucleotides. The synthetic oligonucleotides contain fewer than at or about 250 or 200 nucleotides in length, for example, fewer than about 20, 30, 40, 50, 60, 70, 80, 90, 100, 110, 120, 130, 140, 150, 160, 170, 180, 190 or 200 nucleotides in length. Typically, the oligonucleotides are single-stranded oligonucleotides. The ending “mer” can be used to denote the length of an oligonucleotide. For example, “100-mer” can be used to refer to an oligonucleotide containing 100 nucleotides in length. Exemplary of the synthetic oligonucleotides are positive and negative strand oligonucleotides, randomized oligonucleotides, reference sequence oligonucleotides, template oligonucleotides and fill-in primers.

[0221] As used herein, synthetic oligonucleotides are oligonucleotides produced by chemical synthesis. Chemical oligonucleotide synthesis methods are well known. Any of the known synthesis methods can be used to produce the oligonucleotides. For example, synthetic oligonucleotides typically are made by chemically joining single nucleotide monomers or nucleotide trimers containing protective groups. Typically, phosphoramidites, single nucleotides containing protective groups are added one at a time. Synthesis typically begins with the 3′ end of the oligonucleotide. The 3′ most phosphoramidite is attached to a solid support and synthesis proceeds by adding each phosphoramidite to the 5′ end of the last. After each addition, the protective group is removed from the 5′ phosphate group on the most recently added base, allowing addition of another phosphoramidite. Automated synthesizers generally can synthesize oligonucleotides up to about 150 to about 200 nucleotides in length. Typically, the oligonucleotides are designed and synthesized using standard cyanoethyl chemistry from phosphoramidite monomers. Synthetic oligonucleotides produced by this standard method can be purchased from Integrated DNA Technologies (IDT) (Coralville, Iowa) or TriLink Biotechnologies (San Diego, Calif.).

[0222] As used herein, “primer” refers to a nucleic acid molecule (more typically, to a pool of such molecules sharing sequence identity) that can act as a point of initiation of template-directed nucleic acid synthesis under appropriate conditions (for example, in the presence of four different nucleoside triphosphates and a polymerization agent, such as DNA polymerase, RNA polymerase or reverse transcriptase) in an appropriate buffer and at a suitable temperature. It will be appreciated that certain nucleic acid molecules can serve as a “probe” and as a “primer.” A primer, however, has a 3′ hydroxyl group for extension. A primer can be used in a variety of methods, including, for example, polymerase chain reaction (PCR), reverse-transcriptase (RT)—PCR, RNA PCR, LCR, multiplex PCR, panhandle PCR, capture PCR, expression PCR, 3′ and 5′ RACE, in situ PCR, ligation-mediated PCR and other amplification protocols.

[0223] As used herein, “primary sequence” refers to the sequence of amino acid residues in a polypeptide or the sequence of nucleotides in a nucleic acid molecule.

[0224] As used herein, “similarity” between two proteins or nucleic acids refers to the relatedness between the sequence of amino acids of the proteins or the nucleotide sequences of the nucleic acids. Similarity can be based on the degree of identity of sequences of residues and the residues contained therein. Methods for assessing the degree of similarity between proteins or nucleic acids are known to those of skill in the art. For example, in one method of assessing sequence similarity, two amino acid or nucleotide sequences are aligned in a manner that yields a maximal level of identity between the sequences. “Identity” refers to the extent to which the amino acid or nucleotide sequences are invariant. Alignment of amino acid sequences, and to some extent nucleotide sequences, also can take into account conservative differences and/or frequent substitutions in amino acids (or nucleotides). Conservative differences are those that preserve the physico-chemical properties of the residues involved. Alignments can be global (alignment of the compared sequences over the entire length of the sequences and including all residues) or local (the alignment of a portion of the sequences that includes only the most similar region or regions).

[0225] As used herein, when a polypeptide or nucleic acid molecule or region thereof contains or has “identity” or “homology” to another polypeptide or nucleic acid molecule or region, the two molecules and/or regions share greater than or equal to at or about 40% sequence identity, and typically greater than or equal to at or about 50% sequence identity, such as at least or about 60%, 65%, 70%, 75%, 80%, 85%, 90%, 95%, 96%, 97%, 98%, 99% or 100% sequence identity; the precise percentage of identity can be specified if necessary. A nucleic acid molecule, or region thereof, that is identical or homologous to a second nucleic acid molecule or region can specifically hybridize to a nucleic acid molecule or region that is 100% complementary to the second nucleic acid molecule or region. Identity alternatively can be compared between two theoretical nucleotide or amino acid sequences or between a nucleic acid or polypeptide molecule and a theoretical sequence.

[0226] Sequence “identity,” per se, has an art-recognized meaning and the percentage of sequence identity between two nucleic acid or polypeptide molecules or regions can be calculated using published techniques. Sequence identity can be measured along the full length of a polynucleotide or polypeptide or along a region of the molecule. (See, e.g.: Computational Molecular Biology, Lesk, A. M., ed., Oxford University Press, New York, 1988; Biocomputing: Informatics and Genome Projects, Smith, D. W., ed., Academic Press, New York, 1993; Computer Analysis of Sequence Data, Part I, Griffin, A. M., and Griffin, H. G., eds., Humana Press, New Jersey, 1994; Sequence Analysis in Molecular Biology, von Heinje, G., Academic Press, 1987; and Sequence Analysis Primer, Gribskov, M. and Devereux, J., eds., M Stockton Press, New York, 1991). While there exist a number of methods to measure identity between two polynucleotide or polypeptides, the term “identity” is well known to skilled artisans (Carrillo, H. & Lipman, D., (1988) SIAM J Applied Math 48:1073).

[0227] Sequence identity compared along the full length of two polynucleotides or polypeptides refers to the percentage of identical nucleotide or amino acid residues along the full-length of the molecule. For example, if a polypeptide A has 100 amino acids and polypeptide B has 95 amino acids, which are identical to amino acids 1-95 of polypeptide A, then polypeptide B has 95% identity when sequence identity is compared along the full length of a polypeptide A compared to full length of polypeptide B. Alternatively, sequence identity between polypeptide A and polypeptide B can be compared along a region, such as a 20 amino acid analogous region, of each polypeptide. In this case, if polypeptide A and B have 20 identical amino acids along that region, the sequence identity for the regions is 100%. Alternatively, sequence identity can be compared along the length of a molecule, compared to a region of another molecule. As discussed below, and known to those of skill in the art, various programs and methods for assessing identity are known to those of skill in the art. High levels of identity, such as 90% or 95% identity, readily can be determined without software.

[0228] Whether any two nucleic acid molecules have nucleotide sequences that are at least or about 60%, 70%, 80%, 85%, 90%, 95%, 96%, 97%, 98% or 99% “identical” can be determined using known computer algorithms such as the “FASTA” program, using for example, the default parameters as in Pearson et al. (1988) Proc. Natl. Acad. Sci. USA 85:2444 (other programs include the GCG program package (Devereux, J. et al. (1984) Nucleic Acids Research 12(I):387), BLASTP, BLASTN, FASTA (Altschul, S. F. et al. (1990) J. Molec. Biol. 215:403; Guide to Huge Computers, Martin J. Bishop, ed., Academic Press, San Diego, 1994, and Carrillo et al. (1988) SIAM J Applied Math 48:1073). For example, the BLAST function of the National Center for Biotechnology Information database can be used to determine identity. Other commercially or publicly available programs include, DNAStar “MegAlign” program (Madison, Wis.) and the University of Wisconsin Genetics Computer Group (UWG) “Gap” program (Madison Wis.)). Percent homology or identity of proteins and/or nucleic acid molecules can be determined, for example, by comparing sequence information using a GAP computer program (e.g., Needleman et al. (1970) J. Mol. Biol. 48:443, as revised by Smith and Waterman ((1981) Adv. Appl. Math. 2:482). Briefly, the GAP program defines similarity as the number of aligned symbols (i.e., nucleotides or amino acids), which are similar, divided by the total number of symbols in the shorter of the two sequences. Default parameters for the GAP program can include: (1) a unary comparison matrix (containing a value of 1 for identities and 0 for non-identities) and the weighted comparison matrix of Gribskov et al. (1986) Nucl. Acids Res. 14:6745, as described by Schwartz and Dayhoff, eds., ATLAS OF PROTEIN SEQUENCE AND STRUCTURE, National Biomedical Research Foundation, pp. 353-358 (1979); (2) a penalty of 3.0 for each gap and an additional 0.10 penalty for each symbol in each gap; and (3) no penalty for end gaps.

[0229] In general, for determination of the percentage sequence identity, sequences are aligned so that the highest order match is obtained (see, e.g.: Computational Molecular Biology, Lesk, A. M., ed., Oxford University Press, New York, 1988; Biocomputing: Informatics and Genome Projects, Smith, D. W., ed., Academic Press, New York, 1993; Computer Analysis of Sequence Data, Part I, Griffin, A. M., and Griffin, H. G., eds., Humana Press, New Jersey, 1994; Sequence Analysis in Molecular Biology, von Heinje, G., Academic Press, 1987; and Sequence Analysis Primer, Gribskov, M. and Devereux, J., eds., M Stockton Press, New York, 1991; Carrillo et al. (1988) SIAM J Applied Math 48:1073). For sequence identity, the number of conserved amino acids is determined by standard alignment algorithms programs, and can be used with default gap penalties established by each supplier. Substantially homologous nucleic acid molecules specifically hybridize typically at moderate stringency or at high stringency all along the length of the nucleic acid of interest. Also contemplated are nucleic acid molecules that contain degenerate codons in place of codons in the hybridizing nucleic acid molecule.

[0230] Therefore, the term “identity,” when associated with a particular number, represents a comparison between the sequences of a first and a second polypeptide or polynucleotide or regions thereof and/or between theoretical nucleotide or amino acid sequences. As used herein, the term at least “90% identical to” refers to percent identities from 90 to 99.99 relative to the first nucleic acid or amino acid sequence of the polypeptide. Identity at a level of 90% or more is indicative of the fact that, assuming for exemplification purposes, a first and second polypeptide length of 100 amino acids are compared, no more than 10% (i.e., 10 out of 100) of the amino acids in the first polypeptide differs from that of the second polypeptide. Similar comparisons can be made between first and second polynucleotides. Such differences among the first and second sequences can be represented as point mutations randomly distributed over the entire length of a polypeptide or they can be clustered in one or more locations of varying length up to the maximum allowable, e.g. 10/100 amino acid difference (approximately 90% identity). Differences are defined as nucleotide or amino acid residue substitutions, insertions, additions or deletions. At the level of homologies or identities above about 85-90%, the result is independent of the program and gap parameters set; such high levels of identity can be assessed readily, often by manual alignment without relying on software.

[0231] As used herein, alignment of a sequence refers to the use of homology to align two or more sequences of nucleotides or amino acids. Typically, two or more sequences that are related by 50% or more identity are aligned. An aligned set of sequences refers to 2 or more sequences that are aligned at corresponding positions and can include aligning sequences derived from RNAs, such as ESTs and other cDNAs, aligned with genomic DNA sequence.

[0232] Related or variant polypeptides or nucleic acid molecules can be aligned by any method known to those of skill in the art. Such methods typically maximize matches, and include methods, such as using manual alignments and by using the numerous alignment programs available (e.g., BLASTP) and others known to those of skill in the art. By aligning the sequences of polypeptides or nucleic acids, one skilled in the art can identify analogous portions or positions, using conserved and identical amino acid residues as guides. Further, one skilled in the art also can employ conserved amino acid or nucleotide residues as guides to find corresponding amino acid or nucleotide residues between and among human and non-human sequences. Corresponding positions also can be based on structural alignments, for example by using computer simulated alignments of protein structure. In other instances, corresponding regions can be identified. One skilled in the art also can employ conserved amino acid residues as guides to find corresponding amino acid residues between and among human and non-human sequences.

[0233] As used herein, “analogous” and “corresponding” portions, positions or regions are portions, positions or regions that are aligned with one another upon aligning two or more related polypeptide or nucleic acid sequences (including sequences of molecules, regions of molecules and/or theoretical sequences) so that the highest order match is obtained, using an alignment method known to those of skill in the art to maximize matches. In other words, two analogous positions (or portions or regions) align upon best-fit alignment of two or more polypeptide or nucleic acid sequences. The analogous portions/positions/regions are identified based on position along the linear nucleic acid or amino acid sequence when the two or more sequences are aligned. The analogous portions need not share any sequence similarity with one another. For example, alignment (such that maximizing matches) of the sequences of two homologous nucleic acid molecules, each 100 nucleotides in length, can reveal that 70 of the 100 nucleotides are identical. Portions of these nucleic acid molecules containing some or all of the other non-identical 30 amino acids are analogous portions that do not share sequence identity. Alternatively, the analogous portions can contain some percentage of sequence identity to one another, such as at or about 50%, 55%, 60%, 65%, 70%, 75%, 80%, 85%, 90%, 95%, 96%, 97%, 98%, 99%, or fractions thereof. In one example, the analogous portions are 100% identical.

[0234] As used herein, a “modification” is in reference to modification of a sequence of amino acids of a polypeptide or a sequence of nucleotides in a nucleic acid molecule and includes deletions, insertions, and replacements of amino acids and nucleotides, respectively. Methods of modifying a polypeptide are routine to those of skill in the art, such as by using recombinant DNA methodologies.

[0235] As used herein, “deletion,” when referring to a nucleic acid or polypeptide sequence, refers to the deletion of one or more nucleotides or amino acids compared to a sequence, such as a target polynucleotide or polypeptide or a native or wild-type sequence.

[0236] As used herein, “insertion” or “addition” when referring to a nucleic acid or amino acid sequence, describes the inclusion of one or more additional nucleotides or amino acids, within a target, native, wild-type or other related sequence. Thus, a nucleic acid molecule that contains one or more insertions compared to a wild-type sequence, contains one or more additional nucleotides within the linear length of the sequence. As used herein, “additions,” to nucleic acid and amino acid sequences describe addition of nucleotides, or amino acids onto either termini compared to another sequence.

[0237] As used herein, “substitution” or “replacement” refers to the replacing of one or more nucleotides or amino acids in a native, target, wild-type or other nucleic acid or polypeptide sequence with an alternative nucleotide or amino acid, without changing the length (as described in numbers of residues) of the molecule. Thus, one or more substitutions in a molecule does not change the number of amino acid residues or nucleotides of the molecule. Substitution mutations compared to a particular polypeptide can be expressed in terms of the number of the amino acid residue along the length of the polypeptide sequence. For example, a modified polypeptide having a modification in the amino acid at the 19^{th} position of the amino acid sequence that is a substitution of Isoleucine (Ile; I) for cysteine (Cys; C) can be expressed as 119C, Ile19C, or simply C19, to indicate that the amino acid at the modified 19^{th} position is a cysteine. In this example, the molecule having the substitution has a modification at Ile 19 of the unmodified polypeptide.

[0238] As used herein, a disulfide bond (also called an S—S bond or a disulfide bridge) is a single covalent bond derived from the coupling of thiol groups. Disulfide bonds in proteins are formed between the thiol groups of cysteine residues, and stabilize interactions between polypeptide domains, such as antibody domains.

[0239] As used herein, “coupled” or “conjugated” means attached via a covalent or noncovalent interaction.

[0240] As used herein, the phrase “conjugated to an antibody” or “linked to an antibody” or grammatical variations thereof, when referring to the attachment of a moiety to an antibody or antigen-binding fragment thereof, such as a diagnostic or therapeutic moiety, means that the moiety is attached to the antibody or antigen-binding fragment thereof by any known means for linking peptides, such as, for example, by production of fusion protein by recombinant means or post-translationally by chemical means. Conjugation can employ any of a variety of linking agents to effect conjugation, including, but not limited to, peptide or compound linkers or chemical cross-linking agents.

[0241] As used herein, “phage display” refers to the expression of polypeptides on the surface of filamentous bacteriophage.

[0242] As used herein, a “phage-display compatible cell” or “phage-display compatible host cell” is a host cell, typically a bacterial host cell that can be infected by phage and thus can support the production of phage displaying fusion proteins containing polypeptides, e.g. variant polypeptides and can thus be used for phage display. Exemplary of phage display compatible cells include, but are not limited to, XL1-blue cells.

[0243] As used herein, “panning” refers to an affinity-based selection procedure for the isolation of phage displaying a molecule with a specificity for a binding partner, for example, a capture molecule (e.g. an antigen) or sequence of amino acids or nucleotides or epitope, region, portion or locus therein.

[0244] As used herein, “display protein” or “genetic package display protein” means any genetic package polypeptide for display of a polypeptide on the genetic package, such that when the display protein is fused to (e.g. included as part of a fusion protein with) a polypeptide of interest (e.g. a polypeptide for which reduced expression is desired), the polypeptide is displayed on the outer surface of the genetic package. The display protein typically is present on or within the outer surface or outer compartment of a genetic package (e.g. membrane, cell wall, coat or other outer surface or compartment) of a genetic package, e.g. a viral genetic package, such as a phage, such that upon fusion to a polypeptide of interest, the polypeptide is displayed on the genetic package.

[0245] As used herein, a coat protein is a display protein, at least a portion of which is present on the outer surface of the genetic package, such that when it is fused to the polypeptide of interest, the polypeptide is displayed on the outer surface of the genetic package. Typically, the coat proteins are viral coat proteins, such as phage coat proteins. A viral coat protein, such as a phage coat protein associates with the virus particle during assembly in a host cell. In one example, coat proteins are used herein for display of polypeptides on genetic packages; the coat proteins are expressed as portions of fusion proteins, which contain the coat protein sequence of amino acids and a sequence of amino acids of the displayed polypeptide. The coat protein can be a full-length coat protein or any portion thereof capable of effecting display of the polypeptide on the surface of the genetic package.

[0246] Exemplary of coat proteins are phage coat proteins, such as, but not limited to, (i) minor coat proteins of filamentous phage, such as gene III protein (gIIIp, cp3), and (ii) major coat proteins (which are present in the viral coat at 10 copies or more, for example, tens, hundreds or thousands of copies) of filamentous phage such as gene VIII protein (gVIIIp, cp8); fusions to other phage coat proteins such as gene VI protein, gene VII protein, or gene IX protein (see, e.g., WO 00/71694); and portions (e.g., domains or fragments) of these proteins, such as, but not limited to domains that are stably incorporated into the phage particle, e.g. such as the anchor domain of gIIIp, or gVIIIp. Additionally, mutants of gVIIIp can be used which are optimized for expression of larger peptides, such as mutants having improved surface display properties, such as mutant gVIIp (see, for example, Sidhu et al. (2000) J. Mol. Biol. 296:487-495).

[0247] As used herein, “disease or disorder” refers to a pathological condition in an organism resulting from cause or condition including, but not limited to, infections, acquired conditions, genetic conditions, and characterized by identifiable symptoms. Diseases and disorders of interest herein are those involving Candida infection or those that increase the risk of a Candida infection.

[0248] As used herein, “infection” and “Candida infection” refer to all stages of a Candida life cycle in a host, as well as the pathological state resulting from the invasion by Candida. The invasion by Candida includes, but is not limited to, adhesion to cells (e.g. epithelial or endothelial) or components of the extracellular matrix, germ tube formation, growth, and replication in the host.

[0249] As used herein, “treating” a subject with a disease or condition” means that the subject's symptoms are partially or totally alleviated, or remain static following treatment. Hence treatment encompasses prophylaxis, therapy and/or cure. Treatment also encompasses any pharmaceutical use of any antibody or antigen-binding fragment thereof provided or compositions provided herein.

[0250] As used herein, “prevention” or prophylaxis, and grammatically equivalent forms thereof, refers to methods in which the risk of developing disease or condition is reduced. Thus, prophylaxis refers to prevention of a potential disease and/or a prevention of worsening of symptoms or progression of a disease.

[0251] As used herein, a “pharmaceutically effective agent” includes any therapeutic agent or bioactive agents, including, but not limited to, for example, anesthetics, vasoconstrictors, dispersing agents, conventional therapeutic drugs, including small molecule drugs and therapeutic proteins.

[0252] As used herein, a “therapeutic effect” means an effect resulting from treatment of a subject that alters, typically improves or ameliorates the symptoms of a disease or condition or that cures a disease or condition.

[0253] As used herein, a “therapeutically effective amount” or a “therapeutically effective dose” refers to the quantity of an agent, compound, material, or composition containing a compound that is at least sufficient to produce a therapeutic effect following administration to a subject. Hence, it is the quantity necessary for preventing, curing, ameliorating, arresting or partially arresting a symptom of a disease or disorder.

[0254] As used herein, “therapeutic efficacy” refers to the ability of an agent, compound, material, or composition containing a compound to produce a therapeutic effect in a subject to whom the an agent, compound, material, or composition containing a compound has been administered.

[0255] As used herein, a “prophylactically effective amount” or a “prophylactically effective dose” refers to the quantity of an agent, compound, material, or composition containing a compound that when administered to a subject, will have the intended prophylactic effect, e.g., preventing or delaying the onset, or reoccurrence, of disease or symptoms, reducing the likelihood of the onset, or reoccurrence, of disease or symptoms, or reducing the incidence of fungal infection. The full prophylactic effect does not necessarily occur by administration of one dose, and can occur only after administration of a series of doses. Thus, a prophylactically effective amount can be administered in one or more administrations.

[0256] As used herein, the terms “immunotherapeutically” or “immunotherapy” in conjunction with antibodies provided denotes prophylactic as well as therapeutic administration. Thus, the therapeutic antibodies provided can be administered to a subject at risk of contracting a fungal infection (e.g. a Candida infection) in order to lessen the likelihood and/or severity of the disease, or administered to subjects already evidencing active fungal infection (e.g. a Candida infection).

[0257] As used herein, amelioration of the symptoms of a particular disease or disorder by a treatment, such as by administration of a pharmaceutical composition or other therapeutic, refers to any lessening, whether permanent or temporary, lasting or transient, of the symptoms that can be attributed to or associated with administration of the composition or therapeutic.

[0258] As used herein, the term “diagnostically effective” amount refers to the quantity of an agent, compound, material, or composition containing a detectable compound that is at least sufficient for detection of the compound following administration to a subject. Generally, a diagnostically effective amount of an anti-Candida, such as a detectably-labeled antibody or antigen-binding fragment thereof or an antibody or antigen-binding fragment thereof that can be detected by a secondary agent, administered to a subject for detection is quantity of the antibody or antigen-binding fragment thereof which is sufficient to enable detection of the site having the Candida antigen for which the antibody is specific. In using the antibodies provided herein for the in vivo detection of antigen, a detectably labeled antibody or antigen-binding fragment thereof is given in a dose which is diagnostically effective.

[0259] As used herein, a label or detectable moiety is a detectable marker (e.g., a fluorescent molecule, chemiluminescent molecule, a bioluminescent molecule, a contrast agent (e.g., a metal), a radionuclide, a chromophore, a detectable peptide, or an enzyme that catalyzes the formation of a detectable product) that can be attached or linked directly or indirectly to a molecule (e.g., an anti-Candida antibody provided herein) or associated therewith and can be detected in vivo and/or in vitro. The detection method can be any method known in the art, including known in vivo and/or in vitro methods of detection (e.g., imaging by visual inspection, magnetic resonance (MR) spectroscopy, ultrasound signal, X-ray, gamma ray spectroscopy (e.g., positron emission tomography (PET) scanning, single-photon emission computed tomography (SPECT)), fluorescence spectroscopy or absorption). Indirect detection refers to measurement of a physical phenomenon, such as energy or particle emission or absorption, of an atom, molecule or composition that binds directly or indirectly to the detectable moiety (e.g., detection of a labeled secondary antibody or antigen-binding fragment thereof that binds to a primary antibody (e.g., an anti-Candida antibody provided herein).

[0260] As used herein, the term “subject” refers to an animal, including a mammal, such as a human being.

[0261] As used herein, a patient refers to a human subject.

[0262] As used herein, animal includes any animal, such as, but are not limited to primates including humans, gorillas and monkeys; rodents, such as mice and rats; fowl, such as chickens; ruminants, such as goats, cows, deer, sheep; pigs and other animals. Non-human animals exclude humans as the contemplated animal. The enzymes provided herein are from any source, animal, plant, prokaryotic and fungal. Most enzymes are of animal origin, including mammalian origin.

[0263] As used herein, a “elderly,” refers to refers to a subject, who due to age has a decreased immune response and has a decreased response to vaccination. Typically, an elderly subject is one that is human that is sixty-five and greater years of age, more typically, 70 and greater years of age.

[0264] As used herein, a “human infant” refers to a human less than or about 24 months (e.g., less than or about 16 months, less than or about 12 months, less than or about 6 months, less than or about 3 months, less than or about 2 months, or less than or about 1 month of age). Typically, the human infant is born at more than 38 weeks of gestational age.

[0265] As used herein, a “human infant born prematurely” refers to a human born at less than or about 40 weeks gestational age, typically, less than or about 38 weeks gestational age.

[0266] As used herein, a “unit dose form” refers to physically discrete units suitable for human and animal subjects and packaged individually as is known in the art.

[0267] As used herein, a “single dosage formulation” refers to a formulation for direct administration.

[0268] As used herein, an “article of manufacture” is a product that is made and sold. As used throughout this application, the term is intended to encompass any of the compositions provided herein contained in articles of packaging.

[0269] As used herein, a “fluid” refers to any composition that can flow. Fluids thus encompass compositions that are in the form of semi-solids, pastes, solutions, aqueous mixtures, gels, lotions, creams and other such compositions.

[0270] As used herein, an isolated or purified polypeptide or protein (e.g. an isolated antibody or antigen-binding fragment thereof) or biologically-active portion thereof (e.g. an isolated antigen-binding fragment) is substantially free of cellular material or other contaminating proteins from the cell or tissue from which the protein is derived, or substantially free from chemical precursors or other chemicals when chemically synthesized. Preparations can be determined to be substantially free if they appear free of readily detectable impurities as determined by standard methods of analysis, such as thin layer chromatography (TLC), gel electrophoresis and high performance liquid chromatography (HPLC), used by those of skill in the art to assess such purity, or sufficiently pure such that further purification does not detectably alter the physical and chemical properties, such as enzymatic and biological activities, of the substance. Methods for purification of the compounds to produce substantially chemically pure compounds are known to those of skill in the art. A substantially chemically pure compound, however, can be a mixture of stereoisomers. In such instances, further purification might increase the specific activity of the compound. As used herein, a “cellular extract” or “lysate” refers to a preparation or fraction which is made from a lysed or disrupted cell.

[0271] As used herein, isolated nucleic acid molecule is one which is separated from other nucleic acid molecules which are present in the natural source of the nucleic acid molecule. An “isolated” nucleic acid molecule, such as a cDNA molecule, can be substantially free of other cellular material, or culture medium when produced by recombinant techniques, or substantially free of chemical precursors or other chemicals when chemically synthesized. Exemplary isolated nucleic acid molecules provided herein include isolated nucleic acid molecules encoding an antibody or antigen-binding fragments provided.

[0272] As used herein, a “control” refers to a sample that is substantially identical to the test sample, except that it is not treated with a test parameter, or, if it is a plasma sample, it can be from a normal volunteer not affected with the condition of interest. A control also can be an internal control.

[0273] As used herein, a “composition” refers to any mixture. It can be a solution, suspension, liquid, powder, paste, aqueous, non-aqueous or any combination thereof.

[0274] As used herein, a “combination” refers to any association between or among two or more items. The combination can be two or more separate items, such as two compositions or two collections, can be a mixture thereof, such as a single mixture of the two or more items, or any variation thereof. The elements of a combination are generally functionally associated or related.

[0275] As used herein, combination therapy refers to administration of two or more different therapeutics, such as two or more different anti-Candida antibodies or other anti-fungal antibodies or anti-fungal agents. The different therapeutic agents can be provided and administered separately, sequentially, intermittently, or can be provided in a single composition.

[0276] As used herein, a kit is a packaged combination that optionally includes other elements, such as additional reagents and instructions for use of the combination or elements thereof, for a purpose including, but not limited to, activation, administration, diagnosis, and assessment of a biological activity or property.

[0277] As used herein, the singular forms “a,” “an” and “the” include plural referents unless the context clearly dictates otherwise. Thus, for example, reference to a polypeptide, comprising “an immunoglobulin domain” includes polypeptides with one or a plurality of immunoglobulin domains.

[0278] As used herein, the term “or” is used to mean “and/or” unless explicitly indicated to refer to alternatives only or the alternatives are mutually exclusive.

[0279] As used herein, ranges and amounts can be expressed as “about” a particular value or range. About also includes the exact amount. Hence “about 5 amino acids” means “about 5 amino acids” and also “5 amino acids.”

[0280] As used herein, “optional” or “optionally” means that the subsequently described event or circumstance does or does not occur and that the description includes instances where said event or circumstance occurs and instances where it does not. For example, an optionally variant portion means that the portion is variant or non-variant.

[0281] As used herein, the abbreviations for any protective groups, amino acids and other compounds, are, unless indicated otherwise, in accord with their common usage, recognized abbreviations, or the IUPAC-IUB Commission on Biochemical Nomenclature (see, Biochem. (1972) 11(9):1726-1732).

### B. DOMAIN-EXCHANGED ANTIBODIES

[0282] Among the anti-Candida antibodies provided herein are domain-exchanged antibodies. Domain-exchanged antibodies are antibodies, including antibody fragments, having the domain-exchanged structure, which in general is characterized by a configuration having two interlocked V_{H} domains, with an interface forming between the interlocked V_{H} domains (V_{H}-V_{H}′ interface). Typically, the V_{H} domains interact with opposite V_{L} domains compared to the interaction in a conventional antibody (see, for example, U.S. Application Pub. No. US 2005/0003347). A full-length (e.g. intact IgG) domain-exchanged antibody exists as a monomer. FIG. 1 shows a schematic comparison of exemplary conventional and domain-exchanged IgG antibody structures. In this example, the full-length folded domain-exchanged antibody adopts an unusual structure, in which the two heavy chain variable regions swing away from their cognate light chains and pair instead with the “opposite” light chain variable regions. In the exemplary domain-exchanged full-length antibody illustrated in FIG. 1, the variable region of each heavy chain (V_{H} and V_{H}′, respectively) interacts with the variable region on the opposite light chain compared with the interactions between the constant regions of the molecule (C_{H}-C_{L}). A full-length (e.g. intact IgG) domain exchange antibody can exist as monomers or substantially as dimers (see e.g., West et al. (2009) J. Virol., 83:98-104). Domain-exchanged antibody fragments, for example Fab fragments, exist as dimers due to the interface formed by two interlocking V_{H} domains.

[0283] In conventionally structured IgG, IgD and IgA antibodies, the hinge regions between the C_{H}1 and C_{H}2 domains can provide flexibility, resulting in mobile antibody combining sites that can move relative to one another to interact with epitopes, for example, on cell surfaces. In domain-exchanged antibodies, by contrast, this flexible arrangement is not adopted. In one example, domain-exchanged antibodies can contain two conventional antibody combining sites and a non-conventional antibody combining site, which is formed by the interface between the two adjacently positioned heavy chain variable regions, all of which are in close proximity with one another and constrained in space, as illustrated in the exemplary IgG in FIG. 1.

[0284] Due to the structure of domain-exchanged antibodies, the separation between antigen-binding sites is smaller as compared to conventional antibodies. Conventional full-length antibodies, such as conventional full length IgG antibodies, generally contain two antigen-binding sites separated by distances that are greater than 120 Å, generally 150-170 Å. In contrast, domain-exchanged antibodies have at least two antigen-binding sites separated by a distance that is less than 120 Å. For example, the antigen-binding sites in 2G12 are separated by about 35 Å (see e.g., West et al. (2009) J. Virol., 83:98-104).

[0285] Also, because of their structure, domain-exchanged antibodies can contain multiple binding sites. The size and number of the antigen-binding sites means that domain-exchanged antibodies can specifically bind epitopes within densely packed and/or repetitive epitope arrays, such as sugar residues on yeast, bacterial or viral surfaces. The unusual domain-exchanged configuration can promote binding to such epitopes. In some examples, domain-exchanged antibodies can recognize and bind epitopes within high density arrays, which evolve, for example, in pathogens and tumor cells as means for immune evasion. Examples of such high density/repetitive epitope arrays include, but are not limited to, epitopes contained within yeast and bacterial cell wall carbohydrates and carbohydrates and glycolipids displayed on the surfaces of tumor cells or viruses. Such epitopes are not optimally recognized by conventional (non-domain-exchanged) antibodies. In one example, the high density and/or repetitiveness of epitopes can render simultaneous binding of both antibody-combining sites of a conventional antibody energetically disfavored.

[0286] Domain-exchanged antibodies can be identified based on their structure. As intact IgG molecules, domain-exchanged antibodies form a compact structure, monomeric or dimeric. Thus, unlike typical antibodies that form a Y- or T-shape, a full-length domain-exchanged antibody forms an extended linear conformation due to the parallel arrangement and intimate association formed by the V_{H}-V_{H}′ interface. Based on the unique features of full-length domain-exchanged antibodies, they can be identified by various methods known to one of skill in the art, including, but not limited to, size exclusion chromatography, in-line static light scattering and refractive index monitoring, electron microscopy, sedimentation equilibrium analytical ultracentrifugation, gel filtration, native gel electrophoresis, sedimentation coefficients and/or negative-stain electron microscopy (West et al. (2009) J. Virol., 83:98-104; Roux et al. (2004) Mol. Immunol., 41:1001-1011; Calarese et al. (2005) Science, 300:2065-2071; U.S. Application Publication No. US20050003347). For example, due to the compact structure, a full-length domain-exchanged antibody has a higher sedimentation coefficient then conventional antibodies. Also, due to the unique linear shape, domain-exchanged antibodies can be identified from typical Y- or T-shaped antibodies by methods such as electron microscopy.

[0287] In other antibody forms, such as antibody fragments of a full-length IgG, domain-exchanged antibodies exist as dimers due to the interface formed by two interlocking V_{H} domains. For example, in their Fab form, domain-exchanged binding molecules exist as Fab dimers. As described elsewhere herein, those of skill in the art are familiar with assays to assess the oligomeric state of proteins, such as antibodies, for example assays to assess the presence of a Fab dimer of a domain-exchanged binding molecule. Such assays include, for example, sedimentation equilibrium analytical ultracentrifugation, gel filtration, native gel electrophoresis, velocity sedimentation coefficients and/or negative-stain electron microscopy (Roux et al. (2004) Mol. Immunol., 41:1001-1011; Calarese et al. (2005) Science, 300:2065-2071; U.S. Publication No.: US20050003347; Gach et al. (2010) J. Biol. Chem., 285:1122-1127). For example, domain-exchanged antibodies, such as domain-exchanged Fabs, can be identified by methods such as gel filtration due to the higher molecular mass compared to typical antibodies.

[0288] Exemplary of a domain-exchanged antibody is 2G12. Domain-exchanged antibodies also include any antibody that has a domain-exchanged antibody configuration. These include, for example, any that adopt the domain-exchanged configuration due to mutation(s) in the heavy chains, such as within the joining region between the V_{H} and C_{H} regions (see, for example, U.S. Application Pub. No. US 2005/0003347). The mutant residues include isoleucine (Ile) at position 19, arginine (Arg) at position 57, phenylalanine (Phe) at position 77 and any amino acid residue at position 113 capable of forming a hydrophobic interaction with H84, for example, proline (Pro) or Serine, where numbering is based on Kabat numbering (see e.g. U.S. Application Pub. No. US 2005/0003347; Calarese et al. (2005) Science, 300:2065-2071; Gach et al. (2010) J. Biol. Chem., 285:1122-1127). Further residues for amino acid mutation include amino acid residues 39, 70, 72, 79, 81 and 84, based on Kabat numbering. In particular, the mutations are arginine (Arg) at position 39, serine (Ser) at position 70, aspartic acid (Asp) at position 72, tyrosine (Tyr) at position 79, glutamine (Gln) at position 81, or valine (Val) at position 84, based on Kabat numbering. In another example, mutations in the heavy chain that result in an antibody adopting a domain-exchanged structure include residues isoleucine (Ile) at position 19, arginine (Arg) at position 57 and glutamic acid (Glu) at position 75 in the V_{H}-V_{H}′ interface, residue arginine (Arg) at position 39 in the V_{H}-V_{L} interface and residues alanine (Ala) at position 14, valine (Val) at position 84 and proline (Pro) at position 113 in the elbow region, where numbering is based on Kabat numbering (see e.g. Huber et al., (2010) J. Virol August 11 (Epub)). One of skill in the art is able to identify a domain-exchanged binding molecule based on structural and other properties, for example, oligomerization state.

[0289] 2G12 Domain-Exchanged Antibody

[0290] Exemplary of a domain-exchanged antibody is the 2G12 antibody. Hence, provided herein are modified 2G12 antibodies that bind to and inhibit one or more pathogenic activities of members of the genus Candida. As described in Section C, the modified 2G12 antibodies are modified in their complementarity determining region (CDR) compared to 2G12, thereby resulting in increased binding affinity for Candida compared to the corresponding form of 2G12.

[0291] 2G12 is a broadly neutralizing anti-HIV antibody. Amino acid residues in the V_{H} domains of 2G12 (e.g. amino acids at positions 19 (Ile), 57 (Arg), 77 (Phe), 84 (Val) and 113 (Pro), based on Kabat numbering), which vary compared to analogous residues in conventional antibodies, promote and/or stabilize the domain-exchanged structure and stabilize the interface between the two V_{H} domains (see, for example, U.S. Application Pub. No. US 2005/0003347). With its domain-exchanged structure 2G12 binds with high affinity to oligomannose residues on the surface of HIV. 2G12 binds to an α1→2 mannose epitope on the outer face of HIV gp120 antigen (Calarese et al. (2003) Science 300:2065-2071). The mannoproteins expressed on the cell wall surface of C. albicans and Candida tropicalis contain a repeating Manα1-6Man backbone from which α1-2-linked mannose linkages branch (see, e.g., Cummings et al., in Essentials of Glycobiology, 2^{nd} edition, Cold Springs Harbor (NY): Cold Springs Harbor Laboratory Press, (2009), Chapter 21). 2G12 crossreacts with these α1-2-linked mannose epitopes (Dunlop et al. AIDS (2008) 22(16):2214-2217 and Dunlop et al., (2010) Glycobiology, 20(7):812-823).

[0292] 2G12 antibodies include the domain-exchanged human monoclonal IgG1 antibody produced from the hybridoma cell line CL2 (as described in U.S. Pat. No. 5,911,989; Buchacher et al., (1994) AIDS Research and Human Retroviruses, 10(4) 359-369; and Trkola et al., (1996) Journal of Virology, 70(2) 1100-1108). 2G12 also includes any synthetically, e.g. recombinantly, produced antibody having the identical sequence of amino acids, and any antibody fragment thereof having identical heavy and light chain variable region domains to the full-length antibody. Typically, antibody fragments of 2G12 retain specific binding to the epitope(s) of the HIV gp120 antigen (e.g. as described in U.S. Pat. No. 5,911,989 and in U.S. Application Pub. No. US 2005/0003347). It is understood that 2G12 also can include other sequences that exhibit variation at the N- or C-terminus of the heavy or light chain sequence due to the addition, deletion or substitution of amino acids that results from cloning procedures and recombinant gene expression. Other variants of 2G12 exist or can be generated, so long as the antibody retains the domain-exchanged structure of 2G12 and retains binding characteristics of 2G12. Hence, it is understood that modified anti-Candida antibodies provided herein that are modified in their CDR, also can include other variations described herein or known to one of skill in the art. These include, for example, a 2G12 having a replacement of V5L and H230S in the heavy chain sequence (SEQ ID NO:167; see e.g. West et al. (2009) J. Virol., 83:98-104).

[0293] 2G12 has a sequence of amino acids that includes at least the variable heavy and light chain of 2G12. For example, 2G12 antibodies have a sequence of amino acids for the V_{H} domain set forth in SEQ ID NO: 154; (VQLVESGGGLVKAGGSLILSCGVSNFRISAHTMNWVRRVPGGGLEWVASIST SSTYRDYADAVKGRFTVSRDDLEDFVYLQMHKMRVEDTAIYYCARKGSDRL SDNDPFDAWGPGTVVTVSP), and have a sequence of amino acids for the V_{L} domain set forth in SEQ ID NO:155; DVVMTQSPSTLSASVGDTITITCRASQSIETWLAWYQQKPGKAPKLLIYKAST LKTGVPSRFSGSGSGTEFTLTISGLQFDDFATYHCQHYAGYSATFGQGTRVEI K). As described in the examples herein, a 2G12 sequence based on the native light chain sequence VκI has a sequence of amino acids set forth in SEQ ID NO:162. As noted above, it is understood that 2G12 can include addition, deletion or substitution of amino acids that results from cloning procedures and recombinant gene expression. For example, the light chain of 2G12 pCAL IT* vector has an engineered SgrAI site for the cloning purpose encoding Ala Gly followed by 2 Val. Thus, the variable light chain sequence of 2G12 can include sequence of amino acids set forth in SEQ ID NO: 176, (AGVVMTQSPSTLSASVGDTITITCRASQSIETWLAWYQQKPGKAPKWYKA STLKTGVPSRFSGSGSGTEFTLTISGLQFDDFATYHCQHYAGYSATFGQGTRV EIK).

[0294] 2G12 can exist as a full-length antibody. For example, 2G12 produced from the hybridoma cell line CL2 contains a kappa light C_{L} domain (set forth as amino acids 108-214 in SEQ ID NO:162) and an IgG1 C_{H}1 constant domain (SEQ ID NO: 284; set forth as amino acids 124-226 in SEQ ID NO:161). A full-length 2G12 that has a sequence of amino acids identical to that produced by the CL2 hybridoma cell line has a heavy chain amino acid sequence set forth in SEQ ID NO:160. With respect to SEQ ID NO: 160, the FR1 corresponds to amino acids 1-30; the CDR1 corresponds to amino acids 31-35; the FR2 corresponds to amino acids 36-49; the CDR2 corresponds to amino acids 50-66; the FR3 corresponds to amino acids 67-98; the CDR3 corresponds to amino acids 99-112; the FR4 corresponds to amino acids 113-123; the C_{H1} corresponds to amino acids 124-226; the hinge amino acids correspond to amino acids 227-242; and the C_{H}2-C_{H}3 amino acids correspond to amino acids 243-453. 2G12 has a light chain amino acid sequence set forth in SEQ ID NO:162. With respect to SEQ ID NO:162, the FR1 corresponds to amino acids 1-23; the CDR1 corresponds to amino acids 24-34; the FR2 corresponds to amino acids 35-49; the CDR2 corresponds to amino acids 50-56; the FR3 corresponds to amino acids 57-88; the CDR3 corresponds to amino acids 89-97; the FR4 corresponds to amino acids 98-107; and the C_{L} corresponds to amino acids 108-214. As noted, variation in the 2G12 sequence set forth in SEQ ID NO:160 can exist, for example, due to cloning procedures. Hence, in one example as described in Example 7 herein, a heavy chain sequence of 2G12 can have a sequence of amino acids set forth in SEQ ID NO:210.

[0295] 2G12 also includes antibodies that include other constant domains and/or portions of constant domains. For example, a heavy chain amino acid sequence can include one or more of a C_{H}1, C_{H}2 or C_{H}3 from an IgG1. A 2G12 antibody also can be generated to contain a C_{H}1, C_{H}2, or C_{H}3 from an IgA, IgD, IgE, IgG or IgM class. If the antibody is of an IgE or IgM class it further can contain a C_{H}4. The heavy chain amino acid sequence of 2G12 also can further include a hinge region.

[0296] As a full-length antibody 2G12 exists in both monomeric and dimeric form. Mutations can be made in 2G12 that increases the 2G12 dimer/monomer ratio; dimers can be separately purified therefrom (see e.g. West et al. (2009) J. Virol., 83:98-104). Such dimers can exhibit increased potency and antigen-binding affinity. Exemplary of such mutations include hinge deletion mutants, including but not limited to, mutations corresponding to mutations in 2G12 heavy chain sequence set forth in SEQ ID NO:160 that include deletion of residue 230; deletion of residues 229 to 230; deletion of residues 228 to 230; deletion of residues 227 to 230; deletion of residues 227 to 232; and deletion of residues 227 to 232 and two proline to glycine substitutions at amino acid positions P233G and P234G. Such exemplary 2G12 mutants are set forth in SEQ ID NO:168-174. It is understood that any of the antibodies provided herein can further contain such mutations in the antibody to increase dimer formation of a full-length 2G12 antibody.

[0297] 2G12 antibodies also include antibody fragments. For example, a 2G12 domain-exchanged Fab fragment (see, for example, U.S. Application Publication No. US20050003347 and Calarese et al., (2003) Science, 300, 2065-2071), contains a heavy chain (V_{H}-C_{H}1) having the sequence of amino acids set forth in SEQ ID NO: 161 (EVQLVESGGGLVKAGGSLILSCGVSNFRISAHTMNWVRRVPGGGLEWVASIS TSSTYRDYADAVKGRFTVSRDDLEDFVYLQMHKMRVEDTAIYYCARKGSDR LSDNDPFDAWGPGTVVTVSPASTKGPSVFPLAPSSKSTSGGTAALGCLVKDYF PEPVTVSWNSGALTSGVHTFPAVLQSSGLYSLSSVVTVPSSSLGTQTYICNVN HKPSNTKVDKKVEPKS); and a light chain (V_{L}-C_{L}) having the sequence of amino acids set forth in SEQ ID NO: 162 (DVVMTQSPSTLSASVGDTITITCRASQSIETWLAWYQQKPGKAPKWYKAST LKTGVPSRFSGSGSGTEFTLTISGLQFDDFATYHCQHYAGYSATFGQGTRVEI KRTVAAPSVFIFPPSDEQLKSGTASVVCLLNNFYPREAKVQWKVDNALQSGN SQESVTEQDSKDSTYSLSSTLTLSKADYEKHKVYACEVTHQGLSSPVTKSFNR GEC). Also, as noted above, 2G12 can include addition, deletion or substitution of amino acids that results from cloning procedures and recombinant gene expression. For example, a heavy chain Fab sequence can have a sequence of amino acids set forth in SEQ ID NO:10. In another example, a light chain Fab sequence can have a sequence of amino acids set forth in SEQ ID NO:11.

[0298] It is understood that other 2G12 domain-exchanged antibody fragments can be generated, for example, as described in Section F herein below. Any of the anti-Candida antibodies provided herein, for example 2G12 variants, can be generated as full-length antibodies or as antibodies that are less then full-length, for example, as a domain-exchanged antibody fragment, including, but not limited to, domain-exchanged Fab fragments, domain-exchanged scFv fragments, domain-exchanged Fab hinge fragments, domain-exchanged scFv tandem fragments, domain-exchanged scFv tandem fragments, and domain-exchanged single chain Fab fragments.

### C. ANTI-CANDIDA ANTIBODIES

[0299] Provided are anti-Candida antibodies, in particular anti-Candida domain-exchanged antibodies, that bind to one or more members of the genus Candida, but that is not the 2G12 domain-exchanged antibody. The anti-Candida antibodies provided herein exhibit a binding affinity for an epitope presented on the cell wall of a Candida pathogen or cell that is less than 100 nM. The anti-Candida antibodies provided herein recognize one or more cell wall antigens expressed on the surface of the yeast. In particular, the antibodies provided herein bind to carbohydrate moieties (mannose) present in the cell wall. The anti-Candida antibodies provided herein include those that can bind to the surface of Candida species, such as C. albicans, C. tropicalis, C. krusei and/or C. glabrata. For example, provided herein are anti-Candida antibodies that bind to carbohydrate moieties expressed on the surface of Candida, such as oligomannose moieties present on mannoproteins of the Candida cell wall.

[0300] In some examples, the anti-Candida antibodies provided herein exhibit an affinity for Candida that is less than 100 nM, and typically less than 10 nM, such as less than 1 nM, for example, 0.1 nM to 10 nM, 0.1 nM to 1 nM. For example, the anti-Candida domain-exchanged antibodies provided herein exhibit an affinity for a Candida, for example C. albicans, of about or 0.1 nM, about or 0.5 nM, about or 1 nM, about or 5 nM, about or 10 nM, about or 15 nM, about or 20 nM, about or 25 nM, about or 30 nM, about or 35 nM, about or 40 nM, about or 45 nM, about or 50 nM, about or 60 nM, about or 70 nM, about or 80 nM, about or 90 nM, about or 100 nM. It is understood that the binding affinity of an antibody can vary depending on the assay and conditions employed, although all assays for binding affinity provide a rough approximation. For example, as exemplified in the Examples, binding affinity can be assessed in an in vitro binding assay, such as a FACs or ELISA assay, which measure the binding of the antibody to the Candida yeast cell. By performing various assays under various conditions it is possible to estimate the binding affinity of an antibody. In addition, binding affinities can differ depending on the target source, such as the particular species of Candida, the source of Candida or the preparation of a Candida cell (e.g. fixed versus non-fixed cells). For example, the binding affinity of an anti-Candida domain-exchanged antibody for one species of Candida can differ from the binding affinity for a different species of Candida. The antibodies provided herein bind at least one species of Candida, and generally exhibit a binding affinity that less than 100 nM for at least one species of Candida in an in vitro binding affinity assay.

[0301] Further, binding affinities can differ depending on the structure of an antibody. Hence, a comparison of binding affinities between and among antibodies is to a corresponding form of the antibody.

[0302] In some examples, the anti-Candida antibodies provided herein bind to and inhibit one or more pathogenic activities of members of the genus Candida. Generally, the anti-Candida antibodies provided have the ability to inhibit or reduce one or more pathogenic activities of the yeast, such as, for example, inhibition of adhesion or germ tube formation, opsonization, neutralization of virulence-related enzyme or direct Candidacidal activity either alone or in combination with a therapeutic agent.

[0303] In some examples, an anti-Candida antibody provided herein inhibits the binding of Candida to a cell (e.g. an epithelial or endothelial cell) by at least or about 99%, at least or about 95%, at least or about 90%, at least or about 85%, at least or about 80%, at least or about 75%, at least or about 70%, at least or about 65%, at least or about 60%, at least or about 55%, at least or about 50%, at least or about 45%, at least or about 40%, at least or about 35%, at least or about 30%, at least or about 25%, at least or about 20%, at least or about 15%, or at least or about 10% relative to the binding of Candida to the cell in the absence of the anti-Candida antibody. In some examples, an anti-Candida antibody provided herein inhibits the Candida germ tube formation (i.e. germination) by at least or about 99%, at least or about 95%, at least or about 90%, at least or about 85%, at least or about 80%, at least or about 75%, at least or about 70%, at least or about 65%, at least or about 60%, at least or about 55%, at least or about 50%, at least or about 45%, at least or about 40%, at least or about 35%, at least or about 30%, at least or about 25%, at least or about 20%, at least or about 15%, or at least or about 10% relative to Candida germ tube formation in the absence of the anti-Candida antibody.

[0304] The antibodies provided can be employed for the prevention and/or spread of pathogenic disease, including, but not limited to the inhibition of transmission between subjects, inhibition of establishment of Candida infection in a host, and reduction of Candida colonization in a subject. The antibodies also can be employed for preventing, treating, and/or alleviating of one or more symptoms of a Candida infection or reduce the duration of a Candida infection. Accordingly, treatment of patients with antibodies provided can decrease the mortality and/or morbidity rate associated with Candida infection.

[0305] In some examples, the anti-Candida antibodies provided can be employed to direct therapeutic agents to sites of Candida infection for treatment. The anti-Candida antibodies provided also can be employed to increase the immune the response against a Candida infection.

[0306] Generally, the anti-Candida antibodies provided herein bind to Candida with increased affinity compared to the corresponding form of 2G12. The higher affinity of the anti-Candida antibodies provided herein permits the use of lower doses of the antibodies for the prevention and/or treatment of Candida infection. Lower doses of antibodies that immunospecifically bind to Candida reduces the likelihood of adverse effects of immunoglobulin therapy. In particular, provided herein are anti-Candida antibodies that bind to Candida or to an antigen or epitope thereof with higher binding affinity than the corresponding form of antibody 2G12 binds to the same strain or species of Candida or an antigen or epitope thereof. Accordingly, the antibodies provided herein exhibit increased affinity for C. albicans and other Candida species compared to 2G12.

[0307] Among the antibodies provided herein are domain-exchanged anti-Candida antibodies that are variants of 2G12. Hence, the anti-Candida antibodies provided herein are derived from modification of the anti-gp120 antibody, 2G12, which also binds to Candida species, such as Candida albicans. As described above, 2G12 is a domain-exchanged antibody (U.S. Application Pub. No. US2005/0003347) which can bind to oligomannose epitopes expressed on the surface of HIV gp120 and yeast, such as Candida and Saccharomyces. For example, amino acid modifications can occur in the a complementarity determining regions (CDRs). The modifications include amino acid replacement (substitution), deletion or insertion of one or more residues in a CDR of the V_{L} or V_{H} chain of 2G12. For example, one or more amino acid residues in CDRH1, CDRH2, CDRH3, CDRL1, CDRL2 and/or CDRL3 can be modified. Hence, anti-Candida antibodies provided herein include variant 2G12 antibodies that contain one or more modifications in the CDRH1, CDRH2, CDRH3, CDRL1, CDRL2 and/or CDRL3, and antibodies containing any one or more of the resulting modified CDRs. For example, also provided herein are other domain-exchanged antibodies that include any of the provided modified CDRs.

[0308] The anti-Candida antibodies provided herein can be isolated or identified using the methods described herein below in Section E and in U.S. Application Publication No. 2010/0093563. In one example, nucleic acid libraries encoding variant 2G12 antibodies can be generated and screened by phage display panning for specificity of binding to Candida, such as Candida albicans. Methods for generating such libraries are described herein in Section E. Assays for measuring the binding of the antibodies to yeast in vitro are described herein and are well-known in the art. Such assays can be used compare the binding affinity of a variant 2G12 antibody for Candida. For example, binding affinity can be assessed compared to the corresponding form of an unmodified 2G12.

[0309] The anti-Candida antibodies provided herein include full-length domain-exchanged antibodies or domain-exchanged antibody fragments, including, but not limited to, domain-exchanged Fab fragments, domain-exchanged scFv fragments, domain-exchanged Fab hinge fragments, domain-exchanged scFv tandem fragments, domain-exchanged scFv tandem fragments, and domain-exchanged single chain Fab fragments. Such fragments can be generated using standard recombinant methods and/or by enzymatic digestion as described in U.S. Provisional Application Nos. 61/192,960, 61/192,982 and U.S. Application Publication Nos. 2010/0093563 and 2010/0081575, and further herein in Section F. The V_{L} and V_{H} chains of the anti-Candida antibodies provided herein also can be used to generate full length IgG molecules as described elsewhere herein and in the Examples.

[0310] The anti-Candida antibodies provided herein can be further modified or prepared as conjugates or fusion proteins. For example, anti-Candida domain-exchanged antibodies provided herein can be further modified to increase half-life of the antibody. Hence, in some examples the anti-Candida antibodies provided herein have a half-life of 15 days or longer, 20 days or longer, 25 days or longer, 30 days or longer, 40 days or longer, 45 days or longer, 50 days or longer, 55 days or longer, 60 days or longer, 3 months or longer, 4 months or longer or 5 months or longer. Methods to increase the half-life of an antibody or antigen-binding fragment provided herein are known in the art. Such methods include for example, pegylation, glycosylation, and amino acid substitution as described elsewhere herein.

[0311] 1. Variant 2G12 Anti-Candida Antibodies

[0312] Included among the anti-Candida antibodies provided herein are variant 2G12 antibodies that contain one or more modifications in the variable light chain (V_{L}) of 2G12. The variant or modified 2G12 antibodies provided herein can contain 1, 2, 3, 4, 5, 6, 7, 8, 9, 10, 11, 12, 13, 14, 15, 16, 17, 18, 19 or 20 amino acid modifications

[0313] (e.g. insertion, deletion or replacement of amino acids) in the V_{H} chain or V_{L} chain compared to 2G12. For example, amino acid modifications can occur in the a complementarity determining regions (CDRs). The modifications include amino acid replacement (substitution), deletion or insertion of one or more residues in a CDR of the V_{L} or V_{H} chain of 2G12. For example, one or more amino acid residues in CDRH1, CDRH2, CDRH3, CDRL1, CDRL2 and/or CDRL3 can be modified. Hence, anti-Candida antibodies provided herein include variant 2G12 antibodies that contain one or more modifications in the CDRH1, CDRH2, CDRH3, CDRL1, CDRL2 and/or CDRL3.

[0314] Exemplary of such modifications are variant 2G12 antibodies with one or more modifications in the 2G12 V_{L} CDR3. For example, the variant 2G12 anti-Candida antibodies provided herein can exhibit an increased binding affinity for Candida compared to the corresponding form of 2G12. For example, the one or more modifications can be at one or more amino acid positions in the 2G12 V_{L} CDR3, having the amino acid sequence QHYAGYSAT (SEQ ID NO: 2), which represents immunoglobulin amino acid positions L89-L97 in 2G12, according to Kabat numbering. The modifications can include one or more additions (insertions), deletions, or replacements (substitutions) of an amino acid at any position within the CDR3. For example, provided are domain-exchanged anti-Candida antibodies that contain one or more complementarity determining regions (CDRs) of 2G12 and a variable light chain (V_{L}) determining region 3 (CDR3) that is modified at one or more residues compared to the V_{L} CDR3 of 2G12. The modified antibodies include those that contain a CDRL3 that exhibit at least 30%, 40%, 50%, 60%, 65%, 70%, 75%, 80%, 85%, 90%, 95%, 96%, 97%, 98%, 99% sequence identity to a CDRL3 set forth in SEQ ID NO: 2.

[0315] In specific examples, the modification occurs at one, two, three, four, five, or six of amino acid positions L89, L90, L91, L92, L93, L94, L95, L96 and/or L97 (Gln, His, Tyr, Ala, Gly, Tyr, Ser, Ala, or Thr respectively, according to Kabat numbering). For example, modifications can be at one, two, three, four, five or six of amino acid positions L89, L90, L91, L92, L93, L94 and/or L95. For example, modifications include one, two, three, or all four of amino acid residues L89, L90, L91, L92. In another example, modifications include one, two, three or all four of amino acid residues L92, L93, L94 or L95. The modification(s) can include one or more additions, deletions, or replacements. Typically, modification includes an amino acid replacement or addition.

[0316] Exemplary amino acid replacements in the 2G12 V_{L} CDR3 provided herein include any set forth in Table 2B. Hence, anti-Candida antibodies provided herein include any variant 2G12 antibody that is modified in its V_{L} CDR3 by any of replacements at position L89 set forth in Table 2B, any of the replacements at position L90, any of the replacements at position L91, any of the replacements at position L92, any of the replacements at positions L93, any of the replacements at positions L94 and/or any of the replacements at positions L95. The resulting modified anti-Candida domain-exchanged antibodies exhibit a binding affinity for an epitope presented on Candida that is less than 100 nM. In some examples, the variant 2G12 antibody (or modified anti-Candida antibody) exhibits increased binding affinity for Candida compared to the corresponding form of unmodified 2G12.

TABLE 2B
CDRL3 amino acid replacements

| L89^{Gln} | L90^{His} | L91^{Tyr} | L92^{Ala} | L93^{Gly} | L94^{Tyr} | L95^{Ser} |
|---|---|---|---|---|---|---|
| Asn (N) | Pro (P) | Leu (L) | Lys (K) | Glu (E) | Trp (W) | Arg (R) |
| Ser (S) | Gly (G) | Ala (A) | Arg (R) | Ser (S) | Phe (F) | Trp (W) |
| Tyr (Y) | Gln (Q) | Ser (S) | Met (M) | Ala (A) | His (H) | Asn (N) |
| Gly (G) | Tyr (Y) | Gly (G) | Gln (Q) | Pro (P) | Ala (A) | His (H) |
| | Ser (S) | His (H) | Val (V) | Asp (D) | Ser (S) | Glu (E) |
| | | Trp (W) | Ser (S) | Asn (N) | Gly (G) | Gln (Q) |
| | | | Ile (I) | His (H) | Val (V) | Ala (A) |
| | | | Leu (L) | Glu (E) | Leu (L) | Lys (K) |
| | | | Glu (E) | Tyr (Y) | Thr (T) | Thr (T) |
| | | | His (H) | | Asn (N) | Pro (P) |
| | | | Thr (T) | | | Val (V) |
| | | | Tyr (Y) | | | Leu (L) |
| | | | Asp (D) | | | Gly (G) |
| | | | Asn (N) | | | Asp (D) |
| | | | Gly (G) | | | Tyr (Y) |
| | | | | | | Met (M) |
| | | | | | | Phe (F) |

[0317] In some examples, provided herein are modified 2G12 anti-Candida antibodies having 1, 2, 3 or all 4 of amino acid positions L92, L93, L94, or L95 in a 2G12, based on Kabat numbering, modified. In some examples, the A, G, Y, and S amino acid residues at positions L92, L93, L94, and L95, respectively, of the 2G12 light chain CDR3 are replaced. In some examples, the Ala residue at position L92 of the 2G12 V_{L} CDR3 is replaced with Lys, Arg, Met, Gln, Val, Ser, Ile, Leu, Glu or His. In some examples, the Gly residue at position L93 of the 2G12 V_{L} CDR3 is replaced with Glu, Pro, Ser, Ala or Asp. In some examples, the Tyr residue at position L94 of the 2G12 V_{L} CDR3 is replaced with Trp, Phe or His. In some examples, the Ser residue at position L95 of the 2G12 V_{L} CDR3 is replaced with Arg, Trp, Asn, Glu, Gly, Gln, His, Ala, Asp, Lys, Thr, Pro, Val, Leu or Met.

[0318] Exemplary modified V_{L} CDR3 provided herein include QHYKEWRAT (SEQ ID NO: 30), QHYKEWSAT (SEQ ID NO:31), QHYREWSAT (SEQ ID NO:32), QHYLAWSAT (SEQ ID NO:33), QHYKEWWAT (SEQ ID NO:34), QHYREWWAT (SEQ ID NO:35), QHYLSWSAT (SEQ ID NO:36), QHYKPFNAT (SEQ ID NO:37), QHYRPFNAT (SEQ ID NO:38), QHYMPFNAT (SEQ ID NO:39), QHYQPFNAT (SEQ ID NO:40), QHYLPFNAT (SEQ ID NO:41), QHYEPFNAT (SEQ ID NO:42), QHYKPFEAT (SEQ ID NO:43), QHYRPFEAT (SEQ ID NO:44), QHYKPFQAT (SEQ ID NO:45), QHYRPFQAT (SEQ ID NO:46), QHYQPFQAT (SEQ ID NO:47), QHYIPFQAT (SEQ ID NO:48), QHYKPFSAS (SEQ ID NO:49), QHYRPFSAT (SEQ ID NO:50), QHYQPFSAT (SEQ ID NO:51), QHYVPFSAT (SEQ ID NO:52), QHYHPFSAT (SEQ ID NO:53), QHYKPFHAT (SEQ ID NO:54), QHYRPFHAT (SEQ ID NO:55), QHYMPFHAT (SEQ ID NO:56), QHYEPFHAT (SEQ ID NO:57), QHYKPFRAT (SEQ ID NO:58), QHYVPFRAT (SEQ ID NO:59), QHYEPFRAT (SEQ ID NO:60), QHYKPFAAT (SEQ ID NO:61), QHYVPFAAT (SEQ ID NO:62), QHYIPFAAT (SEQ ID NO:63), QHYKPFDAT (SEQ ID NO:64), QHYMPFDAT (SEQ ID NO:65), QHYMPFKAT (SEQ ID NO:66), QHYMPFTAT (SEQ ID NO:67), QHYMPFPAT (SEQ ID NO:68), QHYQPFWAT (SEQ ID NO:69), QHYSPFWAT (SEQ ID NO:70), QHYMPYRAS (SEQ ID NO:71), QHYKPYRAT (SEQ ID NO:72), QHYMPYRAT (SEQ ID NO:73), QHYQPYRAT (SEQ ID NO:74), QHYLPYRAT (SEQ ID NO:75), QHYEPYRAT (SEQ ID NO:76), QHYKPYDAT (SEQ ID NO:77), QHYKPYSAT (SEQ ID NO:78), QHYQPYVAT (SEQ ID NO:79), QHYEPYKAT (SEQ ID NO:80), QHYLPYQAS (SEQ ID NO:81), QHYREWRAT (SEQ ID NO:218), QHYREFNAT (SEQ ID NO:219), QHYREFHAT (SEQ ID NO:220), QHYRPWSAT (SEQ ID NO:221), QHYMPFNAS (SEQ ID NO:222), QHYIPFEAT (SEQ ID NO:223), QHYLPFQAT (SEQ ID NO:224), QHYIPFSAT (SEQ ID NO:225), QHYQPFHAT (SEQ ID NO:226), QHYQPFRAT (SEQ ID NO:227), QHYVPFKAT (SEQ ID NO:228), QHYLPFKAT (SEQ ID NO:229), QHYKPFWAT (SEQ ID NO:230), QHYQPFVAT (SEQ ID NO:231), QHYRPWWAT (SEQ ID NO:232), QHYLPWWAT (SEQ ID NO:233), QHYMPYSAT (SEQ ID NO:234), QHYQPYSAT (SEQ ID NO:235), QHYEPYVAT (SEQ ID NO:236), QHYQPYKAS (SEQ ID NO:237), QHYMPYNAT (SEQ ID NO:238), QHYQPYNAT (SEQ ID NO:239), QHYLPYNAS (SEQ ID NO:240), QHYSPYWAT (SEQ ID NO:241), QHYLPYEAS (SEQ ID NO:242), QHYEPYLAT (SEQ ID NO:243), QHYLPFGAS (SEQ ID NO:244), QHYKDFSAT (SEQ ID NO:245), QHYMAYQAT (SEQ ID NO:246), QHYQAFNAT (SEQ ID NO:247), QHYKPFSAT (SEQ ID NO:280), QHYMPFRAT (SEQ ID NO:281), QHYKPFMAT (SEQ ID NO:678), QHYQPFDAT (SEQ ID NO:679), QHYREWHAT (SEQ ID NO:680), QHYLSYNAT (SEQ ID NO:681), QHYQPFKAT (SEQ ID NO:682) or QHYMAYDAT (SEQ ID NO:683). Also provided, are any modified CDR3 that exhibits at least 70%, 75%, 80%, 85%, 90%, 95% or more sequence identity to any of SEQ ID NOS: 30-81, 218-247, 280-281 or 678-683. Among the anti-Candida antibodies provided herein are anti-Candida domain-exchanged antibodies containing a V_{L} CDR3 selected from among QHYKEWRAT (SEQ ID NO: 30), QHYKEWSAT (SEQ ID NO:31), QHYREWSAT (SEQ ID NO:32), QHYLAWSAT (SEQ ID NO:33), QHYKEWWAT (SEQ ID NO:34), QHYREWWAT (SEQ ID NO:35), QHYLSWSAT (SEQ ID NO:36), QHYKPFNAT (SEQ ID NO:37), QHYRPFNAT (SEQ ID NO:38), QHYMPFNAT (SEQ ID NO:39), QHYQPFNAT (SEQ ID NO:40), QHYLPFNAT (SEQ ID NO:41), QHYEPFNAT (SEQ ID NO:42), QHYKPFEAT (SEQ ID NO:43), QHYRPFEAT (SEQ ID NO:44), QHYKPFQAT (SEQ ID NO:45), QHYRPFQAT (SEQ ID NO:46), QHYQPFQAT (SEQ ID NO:47), QHYIPFQAT (SEQ ID NO:48), QHYKPFSAS (SEQ ID NO:49), QHYRPFSAT (SEQ ID NO:50), QHYQPFSAT (SEQ ID NO:51), QHYVPFSAT (SEQ ID NO:52), QHYHPFSAT (SEQ ID NO:53), QHYKPFHAT (SEQ ID NO:54), QHYRPFHAT (SEQ ID NO:55), QHYMPFHAT (SEQ ID NO:56), QHYEPFHAT (SEQ ID NO:57), QHYKPFRAT (SEQ ID NO:58), QHYVPFRAT (SEQ ID NO:59), QHYEPFRAT (SEQ ID NO:60), QHYKPFAAT (SEQ ID NO:61), QHYVPFAAT (SEQ ID NO:62), QHYIPFAAT (SEQ ID NO:63), QHYKPFDAT (SEQ ID NO:64), QHYMPFDAT (SEQ ID NO:65), QHYMPFKAT (SEQ ID NO:66), QHYMPFTAT (SEQ ID NO:67), QHYMPFPAT (SEQ ID NO:68), QHYQPFWAT (SEQ ID NO:69), QHYSPFWAT (SEQ ID NO:70), QHYMPYRAS (SEQ ID NO:71), QHYKPYRAT (SEQ ID NO:72), QHYMPYRAT (SEQ ID NO:73), QHYQPYRAT (SEQ ID NO:74), QHYLPYRAT (SEQ ID NO:75), QHYEPYRAT (SEQ ID NO:76), QHYKPYDAT (SEQ ID NO:77), QHYKPYSAT (SEQ ID NO:78), QHYQPYVAT (SEQ ID NO:79), QHYEPYKAT (SEQ ID NO:80), or QHYLPYQAS (SEQ ID NO:81), QHYREWRAT (SEQ ID NO:218), QHYREFNAT (SEQ ID NO:219), QHYREFHAT (SEQ ID NO:220), QHYRPWSAT (SEQ ID NO:221), QHYMPFNAS (SEQ ID NO:222), QHYIPFEAT (SEQ ID NO:223), QHYLPFQAT (SEQ ID NO:224), QHYIPFSAT (SEQ ID NO:225), QHYQPFHAT (SEQ ID NO:226), QHYQPFRAT (SEQ ID NO:227), QHYVPFKAT (SEQ ID NO:228), QHYLPFKAT (SEQ ID NO:229), QHYKPFWAT (SEQ ID NO:230), QHYQPFVAT (SEQ ID NO:231), QHYRPWWAT (SEQ ID NO:232), QHYLPWWAT (SEQ ID NO:233), QHYMPYSAT (SEQ ID NO:234), QHYQPYSAT (SEQ ID NO:235), QHYEPYVAT (SEQ ID NO:236), QHYQPYKAS (SEQ ID NO:237), QHYMPYNAT (SEQ ID NO:238), QHYQPYNAT (SEQ ID NO:239), QHYLPYNAS (SEQ ID NO:240), QHYSPYWAT (SEQ ID NO:241), QHYLPYEAS (SEQ ID NO:242), QHYEPYLAT (SEQ ID NO:243), QHYLPFGAS (SEQ ID NO:244), QHYKDFSAT (SEQ ID NO:245), QHYMAYQAT (SEQ ID NO:246), QHYQAFNAT (SEQ ID NO:247) QHYKPFSAT (SEQ ID NO:280) or QHYMPFRAT (SEQ ID NO:281), QHYKPFMAT (SEQ ID NO:678), QHYQPFDAT (SEQ ID NO:679), QHYREWHAT (SEQ ID NO:680), QHYLSYNAT (SEQ ID NO:681), QHYQPFKAT (SEQ ID NO:682) or QHYMAYDAT (SEQ ID NO:683), or a CDR3 that exhibits at least 70%, 75%, 80%, 85%, 90%, 95% or more sequence identity to any of SEQ ID NOS: 30-81, 218-247, 280-281 or 678-683.

[0319] Modifications of amino acids also can include additions or insertions of amino acids into the light chain CDR3 set forth in SEQ ID NO: 2. For example, 1, 2, 3, or 4 amino acids can be inserted. Exemplary insertions provided herein include any that occur immediately before or immediately after any of amino acids L89, L90, L91, L92, L93, L94, L95, L96 and/or L97, based on Kabat numbering. The insertions can include insertion of any other amino acid. An exemplary insertion is the amino acid glycine (G). For example, as described herein below, modified 2G12 anti-Candida antibodies provided herein include a modified CDR3 containing insertion of the amino acid glycine after amino acid residue L95, based on Kabat numbering.

[0320] In some examples, provided herein are modified 2G12 anti-Candida antibodies having 1, 2, 3 or all 4 of amino acid positions L92, L93, L94, or L95 in a 2G12, based on Kabat numbering, modified, and one or more insertions of amino acids before or after any of L92, L93, L94, or L95. In some examples, the A, G, Y, and S amino acid residues at positions L92, L93, L94, and/or L95, respectively, of the 2G12 light chain CDR3 are replaced, and one or more amino acids is added after position L95. In some examples, the Ala residue at position L92 of the 2G12 V_{L} CDR3 is replaced with Arg or Thr. In some examples, the Gly residue at position L93 of the 2G12 V_{L} CDR3 is replaced with Pro, Ala or Asp. In some examples, the Tyr residue at position L94 of the 2G12 V_{L} CDR3 is replaced with His. In some examples, the Ser residue at position L95 of the 2G12 V_{L} CDR3 is replaced with Thr, Asp, Arg, His, Lys, Tyr, Asn, Phe or Ser. In some example, the amino acid Gly is added after position L95 of the 2G12 V_{L} CDR3.

[0321] Exemplary of such modified light chain CDR3 is QHYRPHTGAT (SEQ ID NO: 82), QHYTAHDGAT (SEQ ID NO:83), QHYTAHRGAT (SEQ ID NO:84), QHYRAHTGAT (SEQ ID NO:85), QHYTAHTGAT (SEQ ID NO:86), QHYTDHHGAT (SEQ ID NO:87), QHYTDHKGAT (SEQ ID NO:88), QHYTDHRGAT (SEQ ID NO:89), QHYTDHYGAT (SEQ ID NO:90), QHYTAHNGAT (SEQ ID NO:684), QHYTPHFGAT (SEQ ID NO:685) or QHYRAHSGAT (SEQ ID NO:686). Also provided, are any modified CDR3 that exhibits at least 70%, 75%, 80%, 85%, 90%, 95% or more sequence identity to any of SEQ ID NOS: 82-90 or 684-686. Among the anti-Candida antibodies provided herein are anti-Candida domain-exchanged antibodies containing a V_{L} CDR3 selected from among QHYRPHTGAT (SEQ ID NO: 82), QHYTAHDGAT (SEQ ID NO:83), QHYTAHRGAT (SEQ ID NO:84), QHYRAHTGAT (SEQ ID NO:85), QHYTAHTGAT (SEQ ID NO:86), QHYTDHHGAT (SEQ ID NO:87), QHYTDHKGAT (SEQ ID NO:88), QHYTDHRGAT (SEQ ID NO:89), QHYTDHYGAT (SEQ ID NO:90), QHYTAHNGAT (SEQ ID NO:684), QHYTPHFGAT (SEQ ID NO:685) or QHYRAHSGAT (SEQ ID NO:686), or a CDR3 that exhibits at least 70%, 75%, 80%, 85%, 90%, 95% or more sequence identity to any of SEQ ID NOS: 82-90 or 684-686.

[0322] In some examples, provided herein are modified 2G12 anti-Candida antibodies having 1, 2, 3 or all 4 of amino acid positions L89, L90, L91, or L92 in a 2G12, based on Kabat numbering, modified. Exemplary of a modified light chain CDR3 is NPLSGYSAT (SEQ ID NO:248). Also provided are any modified CDR3 that exhibits at least 70%, 75%, 80%, 85%, 90%, 95% or more sequence identity to SEQ ID NO: 248. Among the anti-Candida antibodies provided herein are anti-Candida domain-exchanged antibodies containing a V_{L} CDR3 that is NPLSGYSAT (SEQ ID NO:248), or a CDR3 that exhibits at least 70%, 75%, 80%, 85%, 90%, 95% or more sequence identity to SEQ ID NO: 248.

[0323] Hence, exemplary anti-Candida antibodies provided herein are modified 2G12 domain-exchanged antibodies that contain a V_{H} CDR1 having the amino acid sequence set forth in SEQ ID NO: 163, a V_{H} CDR2 having the amino acid sequence set forth in SEQ ID NO: 164, a V_{H} CDR3 having the amino acid sequence set forth in SEQ ID NO: 152, a V_{L} CDR1 having the amino acid sequence set forth in SEQ ID NO: 165, a V_{L} CDR2 having the amino acid sequence set forth in SEQ ID NO: 166, and a V_{L} CDR3 selected from among a V_{L} CDR3 having the amino acid sequence set forth in any of SEQ ID NOS: 30-90, 218-248, 280-281 or 678-686.

[0324] Exemplary anti-Candida variant light chains are set forth in Table 2C below, which indicates the sequence of the variant 2G12 CDRL3 and the SEQ ID NOS for each individual CDR and the SEQ ID NOS for corresponding variable light chains containing each variant CDRL3. The variant amino acids are indicated in boldface type. Provided herein are antibodies containing a light chain having a sequence of acids of any of the variant light chains set forth in Table 2C or a portion thereof, and a heavy chain of 2G12.

TABLE 2C
Anti-Candida variant light chains

| | | Light Chain | Light Chain |
|---|---|---|---|
| | CDRL3 | (AG) | (DVV) |
| SEQUENCE | SEQ ID NO | SEQ ID NO | SEQ ID NO |
| QHYKEWRAT | 30 | 91 | 457 |
| QHYKEWSAT | 31 | 92 | 458 |
| QHYREWSAT | 32 | 93 | 459 |
| QHYLAWSAT | 33 | 94 | 460 |
| QHYKEWWAT | 34 | 95 | 461 |
| QHYREWWAT | 35 | 96 | 462 |
| QHYLSWSAT | 36 | 97 | 463 |
| QHYKPFNAT | 37 | 98 | 464 |
| QHYRPFNAT | 38 | 99 | 465 |
| QHYMPFNAT | 39 | 100 | 466 |
| QHYQPFNAT | 40 | 101 | 467 |
| QHYLPFNAT | 41 | 102 | 468 |
| QHYEPFNAT | 42 | 103 | 469 |
| QHYKPFEAT | 43 | 104 | 470 |
| QHYRPFEAT | 44 | 105 | 471 |
| QHYKPFQAT | 45 | 106 | 472 |
| QHYRPFQAT | 46 | 107 | 473 |
| QHYQPFQAT | 47 | 108 | 474 |
| QHYIPFQAT | 48 | 109 | 475 |
| QHYKPFSAS | 49 | 110 | 476 |
| QHYRPFSAT | 50 | 111 | 477 |
| QHYQPFSAT | 51 | 112 | 478 |
| QHYVPFSAT | 52 | 113 | 479 |
| QHYHPFSAT | 53 | 114 | 480 |
| QHYKPFHAT | 54 | 115 | 481 |
| QHYRPFHAT | 55 | 116 | 482 |
| QHYMPFHAT | 56 | 117 | 483 |
| QHYEPFHAT | 57 | 118 | 484 |
| QHYKPFRAT | 58 | 119 | 485 |
| QHYVPFRAT | 59 | 120 | 486 |
| QHYEPFRAT | 60 | 121 | 487 |
| QHYKPFAAT | 61 | 122 | 488 |
| QHYVPFAAT | 62 | 123 | 489 |
| QHYIPFAAT | 63 | 124 | 490 |
| QHYKPFDAT | 64 | 125 | 491 |
| QHYMPFDAT | 65 | 126 | 492 |
| QHYMPFKAT | 66 | 127 | 493 |
| QHYMPFTAT | 67 | 128 | 494 |
| QHYMPFPAT | 68 | 129 | 495 |
| QHYQPFWAT | 69 | 130 | 496 |
| QHYQPFWAT | 70 | 131 | 497 |
| QHYMPYRAS | 71 | 132 | 498 |
| QHYKPYRAT | 72 | 133 | 499 |
| QHYMPYRAT | 73 | 134 | 500 |
| QHYQPYRAT | 74 | 135 | 501 |
| QHYLPYRAT | 75 | 136 | 502 |
| QHYEPYRAT | 76 | 137 | 503 |
| QHYKPYDAT | 77 | 138 | 504 |
| QHYKPYSAT | 78 | 139 | 505 |
| QHYQPYVAT | 79 | 140 | 506 |
| QHYEPYKAT | 80 | 141 | 507 |
| QHYLPYQAS | 81 | 142 | 508 |
| QHYRPHTGAT | 82 | 143 | 509 |
| QHYTAHDGAT | 83 | 144 | 510 |
| QHYTAHRGAT | 84 | 145 | 511 |
| QHYRAHTGAT | 85 | 146 | 512 |
| QHYTAHTGAT | 86 | 147 | 513 |
| QHYTDHHGAT | 87 | 148 | 514 |
| QHYTDHKGAT | 88 | 149 | 515 |
| QHYTDHRGAT | 89 | 150 | 516 |
| QHYTDHYGAT | 90 | 151 | 517 |
| QHYREWRAT | 218 | 249 | 518 |
| QHYREFNAT | 219 | 250 | 519 |
| QHYREFHAT | 220 | 251 | 520 |
| QHYRPWSAT | 221 | 252 | 521 |
| QHYMPFNAS | 222 | 253 | 522 |
| QHYIPFEAT | 223 | 254 | 523 |
| QHYLPFQAT | 224 | 255 | 524 |
| QHYIPFSAT | 225 | 256 | 525 |
| QHYQPFHAT | 226 | 257 | 526 |
| QHYQPFRAT | 227 | 258 | 527 |
| QHYVPFKAT | 228 | 259 | 528 |
| QHYLPFKAT | 229 | 260 | 529 |
| QHYKPFWAT | 230 | 261 | 530 |
| QHYQPFVAT | 231 | 262 | 531 |
| QHYRPWWAT | 232 | 263 | 532 |
| QHYLPWWAT | 233 | 264 | 533 |
| QHYMPYSAT | 234 | 265 | 534 |
| QHYQPYSAT | 235 | 266 | 535 |
| QHYEPYVAT | 236 | 267 | 536 |
| QHYMPYKAT | 237 | 268 | 537 |
| QHYMPYNAT | 238 | 269 | 538 |
| QHYQPYNAT | 239 | 270 | 539 |
| QHYLPYNAS | 240 | 271 | 540 |
| QHYSPYWAT | 241 | 272 | 541 |
| QHYLPYEAS | 242 | 273 | 542 |
| QHYEPYLAT | 243 | 274 | 543 |
| QHYLPFGAS | 244 | 275 | 544 |
| QHYKDFSAT | 245 | 276 | 545 |
| QHYMAYQAT | 246 | 277 | 546 |
| QHYQAFNAT | 247 | 278 | 547 |
| NPLSGYSAT | 248 | 279 | 548 |
| QHYKPFSAT | 280 | 282 | 549 |
| QHYMPFRAT | 281 | 283 | 550 |
| QHYKPFMAT | 678 | 687 | 696 |
| QHYQPFDAT | 679 | 688 | 697 |
| QHYREWHAT | 680 | 689 | 698 |
| QHYLSYNAT | 681 | 690 | 699 |
| QHYQPFKAT | 682 | 691 | 700 |
| QHYMAYDAT | 683 | 692 | 701 |
| QHYTAHNGAT | 684 | 693 | 702 |
| QHYTPHFGAT | 685 | 694 | 703 |
| QHYRAHSGAT | 686 | 695 | 704 |

[0325] For example, exemplary anti-Candida antibodies provided herein include variant 2G12 antibodies that at least contain a variant light chain having a sequence of amino acids set forth as amino acids 4-105 of any of SEQ ID NOS: 91-151, 249-279, 282-283 or 687-695. For example, exemplary anti-Candida antibodies provided herein include variant 2G12 antibodies that at least contain a variant light chain having a sequence of amino acids set forth as amino acid residues 1-108 of any of SEQ ID NOS: 91-142, 249-279, 282-283 or 687-692, as amino acid residues 1-109 of any of SEQ ID NOS: 143-151 or 693-695, as amino acid residues 1-107 of any of SEQ ID NOS: 457-508, 518-550 or 696-701, or as amino acid residues 1-108 of any of SEQ ID NOS: 509-517 or 702-704. Further, the antibody includes at least a 2G12 variable heavy chain set forth as amino acid residues 4-120 of SEQ ID NO: 154. For example, exemplary anti-Candida antibodies provided herein include variant 2G12 antibodies that contain a variable heavy chain having a sequence of amino acids set forth in SEQ ID NO: 154.

[0326] The variant 2G12 anti-Candida antibodies can be full-length antibodies or can be domain-exchanged antibody fragments thereof. Exemplary full-length variant 2G12 antibodies have a light chain that contains a sequence of amino acids set forth as at least amino acid residues 4-215 of SEQ ID NOS: 91-142, 249-279, 282-283 or 687-692, as amino acid residues 4-216 of SEQ ID NOS: 143-151 or 693-695, as amino acid residues 4-214 of SEQ ID NOS: 457-508, 518-550 or 696-701, or as amino acid residues 4-215 of SEQ ID NOS: 509-517 or 702-704; and a heavy chain that at least includes a sequence of amino acids set forth in SEQ ID NO:160, 209 or 210. For example, exemplary full-length variant 2G12 antibodies have a light chain that contains a sequence of amino acids set forth in any of SEQ ID NOS: 91-151, 249-279, 282-283, 457-550 or 687-704; and a heavy chain that contains a sequence of amino acids set forth in SEQ ID NO:160, 209 or 210.

[0327] Variant 2G12 anti-Candida domain-exchanged antibody fragments include domain-exchanged Fab fragments, domain-exchanged scFv fragments, domain-exchanged Fab hinge fragments, domain-exchanged scFv tandem fragments, domain-exchanged scFv tandem fragments, and domain-exchanged single chain Fab fragments. Exemplary variant 2G12 anti-Candida domain-exchanged Fab antibodies have a light chain that includes at least a sequence of amino acids set forth as at least amino acid residues 4-215 of SEQ ID NOS: 91-142, 249-279, 282-283 or 687-692, as amino acid residues 4-216 of SEQ ID NOS: 143-151 or 693-695, as amino acid residues 4-214 of SEQ ID NOS: 457-508, 518-550 or 696-701, or as amino acid residues 4-215 of SEQ ID NOS: 509-517 or 702-704; and a heavy chain that at least includes amino acid residues 4-225 of SEQ ID NO:10 or 161. For example, exemplary variant 2G12 anti-Candida domain-exchanged Fab fragments variant have a light chain that contains a sequence of amino acids set forth in any of SEQ ID NOS: 91-151, 249-279, 282-283, 457-550 or 687-704; and a heavy chain that contains a sequence of amino acids set forth in SEQ ID NO:161 or 10.

[0328] Exemplary anti-Candida antibodies provided herein are variant 2G12 domain-exchanged Fab antibodies that have a light chain set forth in SEQ ID NO:91, 102, 132, 143 or 145-151 and a heavy chain set forth in SEQ ID NO:10. Also provided herein are variant 2G12 full-length antibodies that have a light chain set forth in SEQ ID NO: 91, 102, 132, 143 or 145-151 and a heavy chain set forth in SEQ ID NO: 209 or 210.

[0329] Exemplary anti-Candida antibodies provided herein are variant 2G12 domain-exchanged Fab antibodies that have a light chain set forth in SEQ ID NOS:687-704 and a heavy chain set forth in SEQ ID NO:10. Also provided herein are variant 2G12-full-length antibodies that have a light chain set forth in SEQ ID NOS: 687-704 and a heavy chain set forth in SEQ ID NO: 160.

[0330] 2. Other Anti-Candida Domain-Exchanged Antibodies

[0331] Provided herein are other domain-exchanged antibodies that include any of the provided CDRs above, including modified CDRs. The anti-Candida domain-exchanged antibody retains the ability to immunospecifically bind to Candida, for example, with a binding affinity that is less than 100 nM. Further, in some examples, the domain-exchanged antibodies exhibit a higher binding affinity than the corresponding form of antibody 2G12 binds to the same strain or species of Candida or an antigen or epitope thereof.

[0332] Domain-exchanged antibodies also can be created from conventional antibodies (see e.g. U.S. Patent Publication No. 2005/0003347). U.S. Patent Publication No. 2005/0003347 describes the structure and properties of an exemplary domain-exchanged antibodies. Using such teachings, one of skill in the art can generate other domain-exchanged antibodies from the sequences of conventional antibodies by incorporating these structural attributes into the conventional antibody. As discussed herein above, a domain-exchanged antibody generally contains at least one and up to all of amino acids isoleucine (Ile) at position 19, arginine (Arg) at position 57, phenylalanine (Phe) at position 77 and any amino acid residue at position 113 capable of forming a hydrophobic interaction with H84, for example, proline (Pro) or serine (Ser), where numbering is based on Kabat numbering. For example, a domain-exchanged antibody can be generated by introducing mutations into the conventional antibody at positions corresponding to amino acid positions 19, 57, 77 and 113 (based on Kabat numbering) of the heavy chain, to form and stabilization of the V_{H}-V_{H} interface. Further, position 38 of the light chain and position 39 of the heavy chain, which typically are conserved glutamine residues in conventional antibodies, can be modified to weaken the V_{H} and V_{L} interface. This can be desirable for the formation of domain-exchanged antibodies. Other amino acid positions that can be modified, such as by amino acid replacement, in a conventional antibody to generate a domain-exchanged antibody include, but are not limited to, amino acid positions 70, 72, 79, 81 and 84 of the heavy chain, according to Kabat numbering. In another example, a domain-exchanged antibody generally contains at least one and up to all of amino acids isoleucine (Ile) at position 19, arginine (Arg) at position 57, glutamic acid (Glu) at position 75, residue arginine (Arg) at position 39, alanine (Ala) at position 14, valine (Val) at position 84 and proline (Pro) at position 113, where numbering is based on Kabat numbering (see e.g. Huber et al., (2010) J. Virol August 11 (Epub)).

[0333] Accordingly, anti-Candida domain-exchanged antibodies can be generated by modifying domain-exchanged antibodies generated by the above methods of modifying the heavy chain. For example, a domain-exchanged antibody that is produced by modification of the heavy chain can be further modified by replacement of the V_{H} and V_{L} CDRs of the antibody with the corresponding V_{H} and V_{L} CDRs of any of the variant 2G12 anti-Candida antibodies provided. In another example, the V_{H} and V_{L} CDRs of a conventional antibody can first be replaced with the V_{H} and V_{L} CDRs of any of the variant 2G12 anti-Candida antibodies provided and then the antibody can be subsequently modified to adopt the domain-exchanged structure. For example, domain-exchanged antibodies provided herein include a V_{L} CDR3 having the amino acid sequence set forth in any of SEQ ID NOS: 30-90, 218-248, 280-281 or 678-686.

[0334] Exemplary anti-Candida antibodies provided herein are domain-exchanged antibodies that contain a V_{H} CDR1 having the amino acid sequence set forth in SEQ ID NO: 163, a V_{H} CDR2 having the amino acid sequence set forth in SEQ ID NO: 164, a V_{H} CDR3 having the amino acid sequence set forth in SEQ ID NO: 152, a V_{L} CDR1 having the amino acid sequence set forth in SEQ ID NO: 165, a V_{L} CDR2 having the amino acid sequence set forth in SEQ ID NO: 166, and a V_{L} CDR3 selected from among a V_{L} CDR3 having the amino acid sequence set forth in any of SEQ ID NOS: 30-90, 218-248, 280-281 or 678-686.

[0335] Exemplary anti-Candida antibodies provided herein are domain-exchanged antibodies that contain a V_{H} CDR1 having the amino acid sequence set forth in SEQ ID NO: 163 and a V_{L} CDR3 selected from among a V_{L} CDR3 having the amino acid sequence set forth in any of SEQ ID NOS: 30-90, 218-248, 280-281 or 678-686. Exemplary anti-Candida antibodies provided herein are domain-exchanged antibodies that contain a V_{H} CDR2 having the amino acid sequence set forth in SEQ ID NO: 164 and a V_{L} CDR3 selected from among a V_{L} CDR3 having the amino acid sequence set forth in any of SEQ ID NOS: 30-90, 218-248, 280-281 or 678-686. Exemplary anti-Candida antibodies provided herein are domain-exchanged antibodies that contain a V_{H} CDR3 having the amino acid sequence set forth in SEQ ID NO: 152 and a V_{L} CDR3 selected from among a V_{L} CDR3 having the amino acid sequence set forth in any of SEQ ID NOS: 30-90, 218-248, 280-281 or 678-686. Exemplary anti-Candida antibodies provided herein are domain-exchanged antibodies that contain a V_{L} CDR1 having the amino acid sequence set forth in SEQ ID NO: 165 and a V_{L} CDR3 selected from among a V_{L} CDR3 having the amino acid sequence set forth in any of SEQ ID NOS: 30-90, 218-248, 280-281 or 678-686. Exemplary anti-Candida antibodies provided herein are domain-exchanged antibodies that contain a V_{L} CDR2 having the amino acid sequence set forth in SEQ ID NO: 166 and a V_{L} CDR3 selected from among a V_{L} CDR3 having the amino acid sequence set forth in any of SEQ ID NOS: 30-90, 218-248, 280-281 or 678-686.

[0336] Exemplary anti-Candida antibodies provided herein are domain-exchanged antibodies that contain a V_{H} CDR1 having the amino acid sequence set forth in SEQ ID NO: 163, a V_{H} CDR2 having the amino acid sequence set forth in SEQ ID NO: 164, a V_{H} CDR3 having the amino acid sequence set forth in SEQ ID NO: 152, and a V_{L} CDR3 selected from among a V_{L} CDR3 having the amino acid sequence set forth in any of SEQ ID NOS: 30-90, 218-248, 280-281 or 678-686.

[0337] Exemplary anti-Candida antibodies provided herein are domain-exchanged antibodies that contain a V_{L} CDR1 having the amino acid sequence set forth in SEQ ID NO: 165, a V_{L} CDR2 having the amino acid sequence set forth in SEQ ID NO: 166, and a V_{L} CDR3 selected from among a V_{L} CDR3 having the amino acid sequence set forth in any of SEQ ID NOS: 30-90, 218-248, 280-281 or 678-686.

### D. ADDITIONAL MODIFICATIONS OF ANTI-CANDIDA ANTIBODIES

[0338] The anti-Candida antibodies provided herein can be further modified. Modifications of an anti-Candida antibody can improve one or more properties of the antibody, including, but not limited to, decreasing the immunogenicity of the antibody, improving the half-life of the antibody, such as reducing the susceptibility to proteolysis and/or reducing susceptibility to oxidation, and altering or improving of the binding properties of the antibody. Exemplary modifications include, but are not limited to, modifications of the primary amino acid sequence of the anti-Candida antibody and alteration of the post-translational modification of the anti-Candida antibody. Exemplary post-translational modifications include, for example, glycosylation, acetylation, pegylation, phosphorylation, amidation, derivatization with protecting/blocking group, proteolytic cleavage, and/or linkage to a cellular ligand or other protein. Other exemplary modifications include attachment of one or more heterologous peptides to the anti-Candida antibody to alter or improve one or more properties of the antibody and/or to facilitate purification.

[0339] Generally, the modifications do not result in increased immunogenicity of the antibody or antigen-binding fragment thereof or significantly negatively affect the binding of the antibody to Candida. Methods of assessing the binding of the modified antibodies to Candida are provided herein and known in the art and described elsewhere herein. For example, modified antibodies can be assayed for binding to Candida by methods such as, but not limited to, ELISA or FACS binding assays.

[0340] Modification of the anti-Candida antibodies produced herein can include one or more amino acid substitutions, deletions or additions, either from natural mutation or human manipulation from the parent antibody from which it was derived. Methods for modification of polypeptides, such as antibodies, are known in the art and can be employed for the modification of any antibody or antigen-binding fragment provided herein. Standard techniques known to those skill in the art can be used to introduce mutations in the nucleotide molecule encoding an antibody or an antigen-binding fragment provided herein in order to produce an polypeptide with one or more amino acid substitutions. Exemplary techniques for introducing mutations include, but are not limited to, site-directed mutagenesis and PCR-mediated mutagenesis.

[0341] 1. Modifications to Reduce Immunogenicity

[0342] In some examples, the antibodies provided herein can be further modified to reduce the immunogenicity in a subject, such as a human subject. For example, one or more amino acids in the antibody can be modified to alter potential epitopes for human T-cells in order to eliminate or reduce the immunogenicity of the antibody when exposed to the immune system of the subject. Exemplary modifications include substitutions, deletions and insertion of one or more amino acids, which eliminate or reduce the immunogenicity of the antibody. Generally, such modifications do not alter the binding specificity of the antibody for its respective antigen. Reducing the immunogenicity of the antibody can improve one or more properties of the antibody, such as, for example, improving the therapeutic efficacy of the antibody and/or increasing the half-life of the antibody in vivo.

[0343] 2. Fc Modifications

[0344] In some examples, the pharmacokinetic properties of the anti-Candida antibodies provided can be enhanced through Fc modifications by techniques known to those skilled in the art. The anti-Candida antibodies provided herein can contain an IgG1 constant domain (e.g. set forth in SEQ ID NO:160 or SEQ ID NO:210) or other immunoglobulin class or modified constant region thereof. For example, the constant region containing the Fc region can be modified to alter one or more properties of the Fc polypeptide. For example, the Fc region can be modified to alter (i.e. more or less) effector functions compared to the effector function of an Fc region of a wild-type immunoglobulin heavy chain. The Fc regions of an antibody interacts with a number of Fc receptors, and ligands, imparting an array of important functional capabilities referred to as effector functions. Fc effector functions include, for example, Fc receptor binding, complement fixation, and T cell depleting activity (see e.g., U.S. Pat. No. 6,136,310). Methods of assaying T cell depleting activity, Fc effector function, and antibody stability are known in the art. For example, the Fc region of an IgG molecule interacts with the FcγRs. These receptors are expressed in a variety of immune cells, including for example, monocytes, macrophages, neutrophils, dendritic cells, eosinophils, mast cells, platelets, B cells, large granular lymphocytes, Langerhans' cells, natural killer (NK) cells, and γδ T cells. Formation of the Fc/FcγR complex recruits these effector cells to sites of bound antigen, typically resulting in signaling events within the cells and important subsequent immune responses such as release of inflammation mediators, B cell activation, endocytosis, phagocytosis, and cytotoxic attack. The ability to mediate cytotoxic and phagocytic effector functions is a potential mechanism by which antibodies destroy targeted cells. Recognition of and lysis of bound antibody on target cells by cytotoxic cells that express FcγRs is referred to as antibody dependent cell-mediated cytotoxicity (ADCC). Other Fc receptors for various antibody isotypes include FcεRs (IgE), FcαRs (IgA), and FcμRs (IgM).

[0345] Thus, a modified constant region containing modification in the Fc region can have altered affinity, including but not limited to, increased or low or no affinity for the Fc receptor. For example, the different IgG subclasses have different affinities for the FcγRs, with IgG1 and IgG3 typically binding substantially better to the receptors than IgG2 and IgG4. In addition, different FcγRs mediate different effector functions. FcγR1, FcγRIIa/c, and FcγRIIIa are positive regulators of immune complex triggered activation, characterized by having an intracellular domain that has an immunoreceptor tyrosine-based activation motif (ITAM). FcγRIIb, however, has an immunoreceptor tyrosine-based inhibition motif (ITIM) and is therefore inhibitory. Thus, altering the affinity of an Fc region for a receptor can modulate the effector functions induced by the Fc domain.

[0346] In one example, an Fc region is used that is modified for optimized binding to certain FcγRs to better mediate effector functions, such as for example, antibody-dependent cellular cytotoxicity, ADCC. Such modified Fc regions can contain modifications in an IgG at one or more of amino acid residues (according to the Kabat numbering scheme, Kabat et al. (1991) Sequences of Proteins of Immunological Interest, U.S. Department of Health and Human Services), including, but not limited to, amino acid positions 249, 252, 259, 262, 268, 271, 273, 277, 280, 281, 285, 287, 296, 300, 317, 323, 343, 345, 346, 349, 351, 352, 353, and 424. For example, modifications in an Fe region can be made corresponding to any one or more of G119S, G119A, S122D, S122E, S122N, S122Q, S122T, K129H, K129Y, D132Y, R138Y, E141Y, T143H, V1471, S150E, H151D, E155Y, E155I, E155H, K157E, G164D, E166L, E166H, S181A, S181D, S187T, S207G, S307I, K209T, K209E, K209D, A210D, A213Y, A213L, A2131,1215D, 1215E, 1215N, 1215Q, E216Y, E216A, K217T, K217F, K217A, and P279L of the exemplary IgG1 sequence set forth in SEQ ID NO:284, or combinations thereof. A modified Fc containing these mutations can have enhanced binding to an FcR such as, for example, the activating receptor FcγIIIa and/or can have reduced binding to the inhibitory receptor FcγRIIb (see e.g., OS 2006/0024298). Fc regions modified to have increased binding to FcRs can be more effective in facilitating the destruction of the fungal cells in patients.

[0347] In some examples, the antibodies or antigen-binding fragments provided herein can be further modified to improve the interaction of the antibody with the FcRn receptor in order to increase the in vivo half-life and pharmacokinetics of the antibody (see, e.g. U.S. Pat. No. 7,217,797, U.S. Pat. Pub. Nos. 2006/0198840 and 2008/0287657). FcRn is the neonatal FcR, the binding of which recycles endocytosed antibody from the endosomes back to the bloodstream. This process, coupled with preclusion of kidney filtration due to the large size of the full length molecule, results in favorable antibody serum half-lives ranging from one to three weeks. Binding of Fc to FcRn also plays a role in antibody transport.

[0348] Exemplary modifications of the Fc region include but are not limited to, mutation of the Fc described in U.S. Pat. No. 7,217,797; U.S. Pat. Pub. Nos. 2006/0198840, 2006/0024298 and 2008/0287657, and International Patent Pub. No. WO 2005/063816, such as mutations at one or more of amino acid residues (Kabat numbering, Kabat et al. (1991)) 251-256, 285-90, 308-314, in the C_{H}2 domain and/or amino acids residues 385-389 and 428-436 in the C_{H}3 domain of the IgG1 heavy chain constant region, where the modification alters Fc receptor binding affinity and/or serum half-life relative to unmodified antibody. In some examples, the IgG constant domain is modified in the Fc region at one or more of amino acid positions 250, 251, 252, 254, 255, 256, 263, 308, 309, 311, 312 and 314 in the C_{H}2 domain and/or amino acid positions 385, 386, 387, 389, 428, 433, 434, 436, and 459 in the C_{H}3 domain of the IgG heavy chain constant region. Such modifications correspond to amino acids Gly120, Pro121, Ser122, Phe124, Leu125, Phe126, Thr133, Pro174, Arg175, Glu177, Gln178, and Asn180 in the C_{H}2 domain and amino acids Gln245, Val246, Ser247, Thr249, Ser283, Gly285, Ser286, Phe288, and Met311 in the C_{H}3 domain in an exemplary IgG1 sequence set forth in SEQ ID NO:284. In some examples, the modification is at one or more surface-exposed residues, and the modification is a substitution with a residue of similar charge, polarity or hydrophobicity to the residue being substituted.

[0349] In particular examples, a IgG heavy chain constant region is modified in the Fc at one or more of amino acid positions 251, 252, 254, 255, and 256 (Kabat numbering), where position 251 is substituted with Leu or Arg, position 252 is substituted with Tyr, Phe, Ser, Trp or Thr, position 254 is substituted with Thr or Ser, position 255 is substituted with Leu, Gly, Ile or Arg, and/or position 256 is substituted with Ser, Arg, Gln, Glu, Asp, Ala, Asp or Thr. In some examples, a IgG heavy chain constant region is modified in the Fc at one or more of amino acid positions 308, 309, 311, 312, and 314, where position 308 is substituted with Thr or Ile, position 309 is substituted with Pro, position 311 is substituted with serine or Glu, position 312 is substituted with Asp, and/or position 314 is substituted with Leu. In some examples, a IgG heavy chain constant region is modified in the Fc at one or more of amino acid positions 428, 433, 434, and 436, where position 428 is substituted with Met, Thr, Leu, Phe, or Ser, position 433 is substituted with Lys, Arg, Ser, Ile, Pro, Gln, or His, position 434 is substituted with Phe, Tyr, or His, and/or position 436 is substituted with His, Asn, Asp, Thr, Lys, Met, or Thr. In some examples, a IgG heavy chain constant region is modified in the Fc at one or more of amino acid positions 263 and 459, where position 263 is substituted with Gln or Glu and/or position 459 is substituted with Leu or Phe.

[0350] In some examples, a Fc heavy chain constant region can be modified to enhance binding to the complement protein C1q. In addition to interacting with FcRs, Fc also interact with the complement protein C1q to mediate complement dependent cytotoxicity (CDC). C1q forms a complex with the serine proteases C1r and C1s to form the C1 complex. C1q is capable of binding six antibodies, although binding to two IgGs is sufficient to activate the complement cascade. Similar to Fc interaction with FcRs, different IgG subclasses have different affinity for C1q, with IgG1 and IgG3 typically binding substantially better than IgG2 and IgG4. Thus, a modified Fc having increased binding to C1q can mediate enhanced CDC, and can enhance destruction of fungal cells. Exemplary modifications in an Fc region that increase binding to C1q include, but are not limited to, amino acid modifications at positions 345 and 353 (Kabat numbering). Exemplary modifications include those corresponding to K209W, K209Y, and E216S in an exemplary IgG1 sequence set forth in SEQ ID NO:284.

[0351] In another example, a variety of Fc mutants with substitutions to reduce or ablate binding with FcγRs also are known. Such muteins are useful in instances where there is a need for reduced or eliminated effector function mediated by Fc. This is often the case where antagonism, but not killing of the cells bearing a target antigen is desired. Exemplary of such an Fc is an Fc mutein described in U.S. Pat. No. 5,457,035, which is modified at amino acid positions 248, 249 and 251 (Kabat numbering). In an exemplary IgG1 sequence set forth in SEQ ID NO:284, amino acid 117 is modified from Leu to Ala, amino acid 118 is modified from Leu to Glu, and amino acid 120 is modified from Gly to Ala. Similar mutations can be made in any Fc sequence such as, for example, the exemplary Fc sequence. This mutein exhibits reduced affinity for Fc receptors.

[0352] The antibodies provided herein can be engineered to contain modified Fc regions. For example, methods for fusing or conjugating polypeptides to the constant regions of antibodies (i.e. making Fc fusion proteins) are known in the art and described in, for example, U.S. Pat. Nos. 5,336,603, 5,622,929, 5,359,046, 5,349,053, 5,447,851, 5,723,125, 5,783,181, 5,908,626, 5,844,095, and 5,112,946; EP 307,434; EP 367,166; EP 394,827; PCT publications WO 91/06570, WO 96/04388, WO 96/22024, WO 97/34631, and WO 99/04813; Ashkenazi et al. (1991) Proc. Natl. Acad. Sci. USA 88:10535-10539; Traunecker et al. (1988) Nature 331:84-86; Zheng et al. (1995) J. Immunol. 154:5590-5600; and Vil et al. (1992) Proc. Natl. Acad. Sci. USA 89:11337-11341 (1992) and described elsewhere herein. In some examples, a modified Fc region having one or more modifications that increases the FcRn binding affinity and/or improves half-life can be fused to an anti-Candida antibody provided herein.

[0353] 3. Pegylation

[0354] The anti-Candida antibodies provided herein can be conjugated to polymer molecules such as high molecular weight polyethylene glycol (PEG) to increase half-life and/or improve their pharmacokinetic profiles. Hence, provided herein are PEGylated anti-Candida domain-exchanged antibodies, for example, variant 2G12 antibodies. Conjugation can be carried out by techniques known to those skilled in the art. Conjugation of therapeutic antibodies with PEG has been shown to enhance pharmacodynamics while not interfering with function (see, e.g., Deckert et al., (2000) Int. J. Cancer 87: 382-390; Knight et al., (2004) Platelets 15: 409-418; Leong et al., (2001) Cytokine 16: 106-119; and Yang et al., (2003) Protein Eng. 16: 761-770). PEG can be attached to the antibodies or antigen-binding fragments with or without a multifunctional linker either through site-specific conjugation of the PEG to the N- or C-terminus of the antibodies or antigen-binding fragments or via epsilon-amino groups present on lysine residues. Linear or branched polymer derivatization that results in minimal loss of biological activity can be used. The degree of conjugation can be monitored by SDS-PAGE and mass spectrometry to ensure proper conjugation of PEG molecules to the antibodies. Unreacted PEG can be separated from antibody-PEG conjugates by, e.g., size exclusion or ion-exchange chromatography. PEG-derivatized antibodies can be tested for binding activity to Candida antigens as well as for in vivo efficacy using methods known to those skilled in the art, for example, by immunoassays described herein.

[0355] 4. Modification with Other Heterologous Peptides

[0356] In some examples, the antibodies can be recombinantly fused to a heterologous polypeptide at the N-terminus or C-terminus or chemically conjugated, including covalent and non-covalent conjugation, to a heterologous polypeptide or other composition. The anti-Candida antibodies provided herein can be modified, for example by the covalent attachment of any type of molecule, such as a diagnostic or therapeutic molecule, to the antibody such that covalent attachment does not prevent the antibody from binding to its corresponding epitope. For example, an anti-Candida antibody provided herein can be further modified by covalent attachment of a molecule such that the covalent attachment does not prevent the antibody from binding to Candida.

[0357] The anti-Candida antibodies provided herein can be modified by the attachment of a heterologous peptide to facilitate purification. Generally such peptides are expressed as a fusion protein containing the antibody fused to the peptide at the C- or N-terminus of the antibody. Exemplary peptides commonly used for purification include, but are not limited to, hexa-histidine peptides, hemagglutinin (HA) peptides, and flag tag peptides (see e.g., Wilson et al. (1984) Cell 37:767; Witzgall et al. (1994) Anal Biochem 223(2):291-298). The fusion does not necessarily need to be direct, but can occur through a linker peptide. In some examples, the linker peptide contains a protease cleavage site which allows for removal of the purification peptide following purification by cleavage with a protease that specifically recognizes the protease cleavage site.

[0358] The anti-Candida antibodies and fragments thereof provided herein also can be modified by the attachment of a heterologous polypeptide that targets the antibody or antigen-binding fragment to a particular cell type, either in vitro or in vivo. In some examples an anti-Candida antibody provided herein can be targeted to a particular cell type by fusing or conjugating the antibody to an antibody specific for a particular cell surface receptors or other polypeptide that interacts with a specific cell receptor.

[0359] The anti-Candida antibodies provided herein can be modified by the attachment of diagnostic and/or therapeutic moiety to the antibody. For example, the heterologous polypeptide or composition can be a diagnostic polypeptide or other diagnostic moiety or a therapeutic polypeptide or other therapeutic moiety. Exemplary diagnostic and therapeutic moieties include, but are not limited to, drugs, radionucleotides, toxins, fluorescent molecules (see, e.g. International PCT Publication Nos. WO 92/08495; WO 91/14438; WO 89/12624; U.S. Pat. No. 5,314,995; and EP 396,387).

[0360] Diagnostic polypeptides or diagnostic moieties can be used, for example, as labels for in vivo or in vitro detection. The detectable moieties can be employed, for example, in diagnostic methods for detecting exposure to Candida or localization of Candida or binding assays for determining the binding affinity of the anti-Candida antibody for Candida. The detectable moieties also can be employed in methods of preparation of the anti-Candida antibodies, such as, for example, purification of the antibody. The detectable moiety can be any material having a detectable physical or chemical property. Such detectable labels have been well-developed in the field of immunoassays and, in general, most any label useful in such methods can be applied in the methods provided. Thus, a label is any composition detectable by spectroscopic, photochemical, biochemical, immunochemical, electrical, optical or chemical means. Useful labels include, but are not limited to, fluorescent dyes (e.g., fluorescein isothiocyanate, Texas red, rhodamine, and the like), radiolabels (e.g., ³H, ¹²⁵I, ³⁵S, ¹⁴C, or ³²P), in particular, gamma and positron emitting radioisotopes (e.g., ¹⁵⁷Gd, ⁵⁵Mn, ¹⁶²Dy, ⁵²Cr, and ⁵⁶Fe), metallic ions (e.g., ¹¹¹In, ⁹⁷Ru, ⁶⁷Ga, ⁶⁸Ga, ⁷²As, ⁸⁹Zr, and ²⁰¹Tl), enzymes (e.g., horse radish peroxidase, alkaline phosphatase and others commonly used in an ELISA), electron transfer agents (e.g., including metal binding proteins and compounds); luminescent and chemiluminescent labels (e.g., luciferin and 2,3-dihydrophthalazinediones, e.g., luminol), magnetic beads (e.g., DYNABEADS™), and colorimetric labels such as colloidal gold or colored glass or plastic beads (e.g., polystyrene, polypropylene, latex, etc.). For a review of various labeling or signal producing systems that can be used, see e.g. U.S. Pat. No. 4,391,904.

[0361] Therapeutic polypeptides or therapeutic moieties can be used, for example, for therapy of a fungal infection, such as Candida infection, or for treatment of one or more symptoms of a fungal infection. Exemplary therapeutic moieties include, but are not limited to, a cytotoxin (e.g., a cytostatic or cytocidal agent), a therapeutic agent or a radioactive metal ion (e.g., alpha-emitters). Exemplary cytotoxin or cytotoxic agents include, but are not limited to, any agent that is detrimental to cells, such as, but not limited to, paclitaxel, cytochalasin B, gramicidin D, ethidium bromide, emetine, mitomycin, etoposide, teniposide, vincristine, vinblastine, colchicine, doxorubicin, daunorubicin, dihydroxyanthracine dione, mitoxantrone, mithramycin, actinomycin D, 1-dehydrotestosterone, glucocorticoids, procaine, tetracaine, lidocaine, propranolol, and puromycin and analogs or homologs thereof. Exemplary therapeutic agents include, but are not limited to, antimetabolites (e.g., methotrexate, 6-mercaptopurine, 6-thioguanine, cytarabine, 5-fluorouracil decarbazine), alkylating agents (e.g., mechlorethamine, thiotepa, chlorambucil, melphalan, carmustine (BSNU) and lomustine (CCNU), cyclophosphamide, busulfan, dibromomannitol, streptozotocin, mitomycin C, and cis-dichlorodiamine platinum (II) (DDP) cisplatin), anthracyclines (e.g., daunorubicin (formerly daunomycin) and doxorubicin), antibiotics (e.g., dactinomycin (formerly actinomycin), bleomycin, mithramycin, and anthramycin (AMC)), anti-mitotic agents (e.g., vincristine and vinblastine), and antifungal agents, such as, but not limited to, fluconazole, itraconazole, voriconazole, ketoconazole, miconazole, terconazole, clotrimazole, econazole, fenticonazole, sulconazole, tioconazole, isoconazole, omoconazole, oxiconazole, flutrimazole, butoconazole, amphotericin, nystatin, flucytosine, caspofungin, terbinafine, and gentian violet.

[0362] In some examples, the anti-Candida antibodies and antibody fragments provided herein can be further modified by conjugation to a therapeutic moiety that is a therapeutic polypeptide. Exemplary therapeutic polypeptides include, but are not limited to, a toxin, such as abrin, ricin A, Pseudomonas exotoxin, or diphtheria toxin; or an immunostimulatory agent, such as a cytokine, such as, but not limited to, an interferon (e.g., IFN-α, β, γ, ω), a lymphokine, a hematopoietic growth factor, such as, for example, GM-CSF (granulocyte macrophage colony stimulating factor), Interleukin-2 (IL-2), Interleukin-3 (IL-3), Interleukin-4 (IL-4), Interleukin-7 (IL-7), Interleukin-10 (IL-10), Interleukin-12 (IL-12), Interleukin-14 (IL-14), and Tumor Necrosis Factor (TNF).

[0363] The anti-Candida antibodies can also be attached to solid supports, which are useful for immunoassays or purification of the target antigen. Exemplary solid supports include, but are not limited to, glass, cellulose, polyacrylamide, nylon, polystyrene, polyvinyl chloride or polypropylene.

### E. METHODS OF IDENTIFYING ANTI-CANDIDA DOMAIN-EXCHANGED ANTIBODIES

[0364] The anti-Candida domain-exchanged antibodies provided herein can be identified by any method known to one of skill in the art used to identify antigen-specific antibodies. In one example, such methods include, for example, immunization and hybridoma screening methods. In another example, such methods include using combinatorial libraries of variant domain-exchanged antibodies or fragments thereof to screen for antibodies or fragments thereof for the desired activity or activities, for example, binding to Candida.

[0365] Exemplary of methods for identifying antibodies against particular pathogens, for example Candida, are screening assays of variants of existing domain-exchanged antibodies from combinatorial variant domain-exchanged antibody libraries. The libraries can be used to screen for antibodies that specifically bind to desired pathogens or cells, in particular viral, fungal or bacterial or other cellular pathogen that contains high density/repetitive epitopes such as carbohydrates and glycolipids. For example, the libraries can be used to screen for antibodies against Candida. Hence, methods of identifying anti-Candida antibodies, including any provided herein, include screening combinatorial variant libraries of 2G12 or a fragment thereof, for example, variant 2G12 Fab libraries. For example, the libraries or collections can be used to identify variant domain-exchanged antibodies, for example variant 2G12 antibodies, that exhibit increased affinity for Candida compared to the corresponding form of 2G12.

[0366] 1. Domain-Exchanged Antibody Libraries

[0367] In generating the libraries, any domain-exchanged antibody can serve as the template for generating variant members of the libraries. As discussed elsewhere herein, one of skill in the art is able to identify and/or generate a domain-exchanged antibody based on structural and other properties. Exemplary of a domain-exchanged antibody is 2G12 or an antigen fragment thereof. Hence, 2G12 can be used as a scaffold in generating the antibodies or libraries. Therefore, provided herein are libraries or collections that contain a plurality of variant domain-exchanged antibodies or antibody fragments, in particular a plurality of variant 2G12 antibodies or antibody fragments thereof. Alternatively, any other domain-exchanged antibody can be used as the scaffold, template or starting antibody. As discussed elsewhere herein, a domain-exchanged antibody includes any antibody containing at least one or all of the amino acid residues isoleucine (Ile) at position 19, arginine (Arg) at position 57, phenylalanine (Phe) at position 77 and any amino acid residue at position 113 capable of forming a hydrophobic interaction with H84, for example, proline (Pro) or serine (Ser), where numbering is based on Kabat numbering. Further residues for amino acid mutation include amino acid residues 39, 70, 72, 79, 81 and 84 based on Kabat numbering. In particular, the mutations are arginine (Arg) at position 39, serine (Ser) at position 70, aspartic acid (Asp) at position 72, tyrosine (Tyr) at position 79, glutamine (Gln) at position 81 and valine (Val) at position 84, based on Kabat numbering. In another particular example, a domain-exchanged antibody includes any antibody containing at least one or all of amino acids isoleucine (Ile) at position 19, arginine (Arg) at position 57, glutamic acid (Glu) at position 75, residue arginine (Arg) at position 39, alanine (Ala) at position 14, valine (Val) at position 84 and proline (Pro) at position 113, where numbering is based on Kabat numbering (see e.g. Huber et al., (2010) J. Virol August 11 (Epub)). As discussed elsewhere herein, one of skill in the art is able to identify a domain-exchanged antibody based on structural and other properties, for example, oligomerization state.

[0368] In generating the libraries, variant antibodies can be generated by randomizing residues in the variable heavy chain and/or variable light chain of any of the above scaffold antibodies. Libraries containing a plurality of antibodies randomized or diversified at specified amino acid positions (e.g. mutated at all or a subset of the other 19 amino acids) can be generated. It is understood that the variant antibodies are designed such that they retain the domain-exchanged structure. For example, residues that are required for domain-exchange are not randomized in generating the libraries. Thus, for example, amino acid residues isoleucine (Ile) at position 19, arginine (Arg) at position 57, phenylalanine (Phe) at position 77 and proline (Pro) or serine (Ser) at position 113 are not changed in the libraries herein. In particular residue Arg at position 57 is not changed.

[0369] Exemplary template or scaffold antibodies for use in designing the antibodies and libraries herein do not bind to the target antigen that is to be selected against in the screening methods. For example, this ensures that when the libraries are created, the members of the library include minimal carryover of the backbone template vector. Where such carryover does exist, the template backbone vector is non-binding and will not be selected in screening or selection methods herein. For example, non-binding backbone vectors can include alanine mutations at amino acid residue positions associated with antigen-binding. Typically, one or more alanine mutations are included in the variable heavy chain and/or variable light chain that itself is being varied at other amino acid residues. For example, if residues in the variable heavy chain are being varied, than a non-binding scaffold used in the design of libraries herein includes alanine mutations at a heavy chain residue associated with antigen binding. In another example, if residues in the variable light chain are being varied, than a non-binding scaffold used in the design of libraries herein includes alanine mutations at a light chain residue associated with antigen binding. Typically, the alanine mutations are made directly in the CDR that is being randomized, including in the randomized residues. Exemplary of amino acid residues in 2G12 that can be replaced with an alanine for use as a non-binding backbone scaffold include, for example, light chain residues Tyr^{L91}, Tyr^{L94} and/or Ser^{L95} or heavy chain residues Leu^{L100}, Ser^{L100a} and/or Asn^{L100c}, each based on Kabat numbering. For example, exemplary of a non-binding backbone domain-exchanged antibody binding molecule is a 2G12 antibody or fragment thereof containing alanine mutations in the CDR H3 of the variable heavy chain (designated 3-ALA) at amino acid residues 104, 105 and 107 corresponding to amino acid residues in the V_{H} domain set forth in SEQ ID NO:156. Exemplary of a non-binding backbone domain-exchanged antibody binding molecule is a 2G12 antibody or fragment thereof containing alanine mutations in the CDR L3 of the variable light chain (designated 3-ALA LC) at amino acid residues 91, 94 and 95 corresponding to amino acid residues in the V_{H} domain set forth in SEQ ID NO:177. Additionally, amino acid residues 91, 94 and 95 of SEQ ID NO:177 correspond to amino acid residues 92, 95 and 96 of SEQ ID NO:157. Non-binding vectors also include vectors that contain the sequence of a domain-exchanged antibody that is identified as being non-binding. For example, clone F7 was identified in a screening assay not to bind to gp120. Table 2D lists exemplary 2G12 non-binding scaffold antibody vectors that can be used in the design of variant 2G12 libraries. It is within the level of one of skill in the art to design similar non-binding vectors for other variant domain-exchanged libraries. The non-binding backbone vectors do not bind gp120 or Candida antigen.

TABLE 2D
Non-Binding Vectors

| | SEQ | |
|---|---|---|
| | ID | |
| Backbone vector | NO | Amino acid change |
| 2G123Ala LC pCAL IT* | 23 | Y91A; Y94A; S95A |
| 2G12 SapI 3Ala LC | 552 | Y91A; Y94A; S95A |
| pCAL IT* | | |
| 2G12 3Ala LC pCAL | 196 | Y91A; Y94A; S95A |
| G13 | | |
| 2G12 DVV 3Ala LC | 338 | Y91A; Y94A; S95A |
| pCAL G13 | | |
| 2G12 3Ala pCAL IT* | 4 | L100A, S100aA, N100cA |
| 2G12 3Ala-1 pCAL | 195 | L100A, S100aA, N100cA |
| G13 | | |
| 2G12 3Ala pCAL IT* | 333 | L100A, S100aA, N100cA |
| SacI | | |
| Clone F7 | 419 | A31A; T33S; N35Y; K95G; |
| | | G96S; S97Y; R99G; L100Y; |
| | | S100aY; D100bA; D100dY |

[0370] The libraries or collections can be used to screen for or identify variant domain-exchanged antibodies, such as variant 2G12 antibodies, that exhibit increased binding affinity for a particular pathogen compared to the corresponding form of the domain-exchanged antibody not including the modification (e.g. wildtype). It is understood that the binding affinity of an antibody can vary depending on the assay and conditions employed, although all assays for binding affinity provide a rough approximation. By performing various assays under various conditions it is possible to estimate the binding affinity of an antibody. In addition, binding affinities can differ depending on the structure of an antibody. For example, binding affinities can differ between a domain-exchanged Fab fragment and a full-length domain-exchanged antibody. Thus, comparisons of binding affinities or specificities is generally between and among corresponding forms of an antibody. Finally, binding affinities and specificities can differ depending on the particular form of a antigen. Depending on the particular form of an antigen (e.g. whole cell recombinant antigen) binding affinities can vary by orders of magnitude. Accordingly, comparison of binding affinities or specificities is to the same form of antigen.

[0371] Typical of screening methods are high throughput screening of antibody libraries. Any known methods for generating libraries containing variant polynucleotides and/or polypeptides can be used. For example, any method described herein and/or known to one of skill in the art, for example, methods described in U.S. Provisional Application No. 61/192,916 and U.S. Publication No. 2010/0081575, can be used to generate domain-exchanged antibody libraries. The libraries can be used in screening assays to select variant domain-exchanged antibodies from the library for any antigen, including, for example, any Candida antigen described herein. To facilitate screening, antibody libraries typically are screened using a display technique, such that there is a physical link between the individual molecules of the library (phenotype) and the genetic information encoding them (genotype). These methods include, but are not limited to, cell display, including bacterial display, yeast display and mammalian display, phage display (Smith, G. P. (1985) Science 228:1315-1317), mRNA display, ribosome display and DNA display.

[0372] a. Variant Libraries

[0373] Variant domain-exchanged antibodies are generated herein such that each antibody or antibody member contains two variable heavy chains and two variable light chains, or a sufficient portion thereof to bind to antigen. Generally, domain-exchanged antibody libraries are generated from nucleic acid molecule(s) encoding two V_{H} chains and two V_{L} chains, whereby the V_{H} domains interact producing a V_{H}-V_{H}′ interface characteristic of the domain-exchanged configuration. The nucleic acid molecules can be generated separately, such that upon expression a domain-exchanged antibody is formed. For example, variant nucleic molecules can be generated encoding a V_{H} chain of a domain-exchanged antibody and/or variant nucleic acid molecules can be generated encoding a V_{L} chain of a domain-exchanged antibody. Upon co-expression of the nucleic acid molecules in a cell, a variant-domain-exchanged antibody is generated. Alternatively, a single nucleic acid molecule can be generated that encodes both the variant V_{H} and V_{L} chains of a domain-exchanged antibody. This is exemplified herein, for example, using a pCAL vector or variant or mutant thereof. In such a vector, a single nucleic acid molecule encodes both the heavy and light chain domains of a domain-exchanged antibody, for example, 2G12.

[0374] In any of the libraries herein, the nucleic acid molecules also can further contain nucleotides for the hinge region and/or constant regions (e.g. C_{L} or C_{H}1, C_{H}2 and/or C_{H}3) of the domain-exchanged antibody. Further, the nucleic acid molecules optionally can include nucleotides encoding peptide linkers. Methods to generate and express antibodies are described herein in Section F, and can be adapted for use in generating any domain-exchanged antibody library. Hence, the domain-exchanged antibody libraries can include members that are full-length antibodies, or that are antibody fragments thereof. Generally, domain-exchanged antibody libraries are Fab libraries. Further, it is understood that upon screening and selection of an antibody from the library, the selected member can be generated in any form, such as a full-length antibody or as an antibody fragment.

[0375] The libraries provided herein include a plurality of variant domain-exchanged antibodies. The libraries can be generated through diversification or randomization methods as described herein below. In one example, a domain-exchanged antibody library includes variant light chain libraries, whereby each member contains variant residues only in the light chain. In another example, a domain-exchanged antibody includes variant heavy chain libraries, whereby each member contains variant residues only in the heavy chain of the domain-exchanged antibody. In a further example, domain-exchanged antibody libraries include libraries where members include variant residues in both the heavy and light chains of the library. In all examples, the libraries of domain-exchanged antibodies are diverse, and contain least at or about 10⁴, 10⁵, 10⁶, 10⁷, 10⁸, 10⁹, 10¹⁰, 10¹¹, 10¹², 10¹³, 10¹⁴, 10¹⁵, 10¹⁶, 10¹⁷, 10¹⁸, or more, different members. Typically, antibody libraries provided herein contain at least or about 10⁷, 10⁸, 10⁹, 10¹⁰, 10¹¹, 10¹², 10¹³, 10¹⁴, 10¹⁵, 10¹⁶, 10¹⁷, 10¹⁸, or more different members. In some examples, and as described further below, the libraries are designed so that the libraries do not contain members that have the sequence of a wild-type domain-exchanged antibody or that have a frequency of wild-type members that is less than 1%, for example, 0.1%, 0.01%, 0.001% or less. The libraries herein can be provided as display libraries, such as phage display libraries.

[0376] i. Selecting Residues

[0377] Libraries can be generated by diversification of amino acid residues in a scaffold domain-exchanged antibody, such as 2G12 or a non-binding 2G12. Hence, the libraries provided herein include members that have one or more amino acid variations compared to a scaffold domain-exchanged antibody. Generally, only the variable heavy chain and/or variable light chain of the antibody is diversified (e.g. varied) compared to the scaffold template. For example, any one or more residues in the CDR L1, L2, L3, H1, H2 and/or H3 can be varied to generate a plurality of antibodies that are mutated compared to the starting scaffold antibody. Diversification also can be effected in amino acid residues in the framework regions or hinge regions. For example, diversification of any one or more up to all residues in 2G12 can be effected, for example, amino acid residues in the CDR H1 (amino acid residues 31-35 of SEQ ID NO:154); CDR H2 (amino acid residues 50-66 of SEQ ID NO:154); CDR H3 (amino acid residues 99-112 of SEQ ID NO:154); CDRL1 (amino acid residues 24-34 of SEQ ID NO:155); CDR L2 (amino acid residues 50-56 of SEQ ID NO:155) and/or CDR L3 (amino acid residues 89-97 of SEQ ID NO:155). For example, 1, 2, 3, 4, 5, 6, 7, 8, 9, 10, 11, 12, 13, 14, 15, 16, 17, 18, 19, 20, 21, 22, 23, 24, 25, 26, 27, 28, 29, 30 or more residues are selected for variation in the libraries herein. One of skill in the art knows and can identify the CDRs and FR based on Kabat or Chothia numbering (see e.g., Kabat, E. A. et al. (1991) Sequences of Proteins of Immunological Interest, Fifth Edition, U.S. Department of Health and Human Services, NIH Publication No. 91-3242, and Chothia, C. et al. (1987) J. Mol. Biol. 196:901-917). As noted above, it is understood that residues involved in domain exchange as described elsewhere herein are not varied. Thus, for example, residue 57 in CDRH2 of 2G12 is not varied.

[0378] Exemplary of residues selected for diversification are those that are directly involved in antigen-binding. In one example, residues involved in antigen-binding can be identified empirically, for example, by mutagenesis experiments directly assessing binding to an antigen. In another example, residues involved in antigen-binding can be elucidated by analysis of crystal structures of the domain-exchanged binding molecule with the antigen or a related antigen or other antigen. For example, crystal structures of 2G12 complexed with various antigens can be used to elucidate and identify potential antigen-binding residues. It is contemplated that such residues may be involved in binding to diverse antigens, including Candida.

[0379] For example, based on crystal structure analysis of 2G12 binding to various antigens, exemplary antigen binding residues include, but are not limited to, L93 to L94 in CDR L3; H31, H32 and H33 in CDRH1; H52a in CDRH2; and H95, H96, H97, H98, H99, H100 in CDR H3, where residues are based on Kabat numbering (Calarese et al. (2005) Science, 300:2065). Other residues for diversification include L89, L90, L91, L92, L95, L96 and L97 in CDR L3; H35 in CDRH1; and H96, H100, H100a, H100b, H100c, H100d, H100e of CDRH3, based on Kabat numbering. Thus, exemplary residues for diversification and randomization herein include, but are not limited to, L89, L90, L91, L92, L93, L94, L95, L96, L97, H31, H32, H33, H35, H52a, H95, H96, H97, H98, H99, H100, H100a, H100b, H100c, H100d and/or H100e, based on Kabat numbering. In some examples, diversification of a CDR can include the addition of 1, 2, 3 or 4 amino acids within the CDR, which are similarly subjected to mutagenesis. For example, residues L95a and/or L95b can be added and subjected to mutagenesis as described herein in the Examples. Any one or more of the above residues can be randomized in designing the libraries herein. For example, 1, 2, 3, 4, 5, 6, 7, 8, 9, 10, 11, 12, 13, 14, 15, 16, 17, 18, 19, 20, 21, 22, 23, 24, 25, 26, 27, 28, 29, 30 or more residues are randomized. Hence, 2G12 libraries provided herein are varied at any of the above residues. In some examples, 2G12 libraries include heavy chain libraries where only residues in the heavy chain are varied. In other examples, 2G12 libraries include light chain libraries where only residues in the light chain are varied. Other libraries provided herein include combination libraries where residues in the heavy and light chain are varied.

[0380] For examples, 2G12 variant libraries provided herein include 2G12 heavy chain variant libraries. In particular, an exemplary heavy chain library includes members having amino acid residues in the CDRH1 and/or CDRH3 varied. For example, an exemplary heavy chain library includes members having amino acid residues His^{H32}, Thr^{H33}, Gly^{H96}, Leu^{H100a}, Asn^{H100c} and Asp^{H100d}, based on Kabat numbering, diversified among members of the library. In another example, an exemplary heavy chain library includes members having amino acid residues Ala^{H31}, His^{H32}, Thr^{H33}, Asn^{H35}, Lys^{H95}, Gly^{H96}, Ser^{H97}, Asp^{H98}, Arg^{H99}, Leu^{H100}, Ser^{H100a}, Asp^{H1001}, Asn^{H100c}, Asp^{H100d}, Pro^{H100}e, based on Kabat numbering, diversified among members of the library. In a further example, an exemplary heavy chain library includes members having amino acid residues Lys^{H95}, Gly^{H96}, Asp^{H100b} and Asp^{H100d}, based on Kabat numbering, diversified among members of the library. In another example of a library, an exemplary heavy chain library includes members having amino acid residues His^{H32} and Thr^{H33}, based on Kabat numbering, diversified among members of the library. In other examples, an exemplary heavy chain library includes members having amino acid residues Gly^{H96}, Leu^{H100}, Ser^{H100a}, Asn^{H100c}, and Asp^{H100d}, based on Kabat numbering, diversified among members of the library. In an additional example, an exemplary heavy chain library includes members having amino acid residues Lys^{H95}, Gly^{H96}, Ser^{H97}, Asp^{H98}, Arg^{H99}, Leu^{H100}, Ser^{H100a}, Asp^{H100b}, Asn^{H100c} and Asp^{H100d}, based on Kabat numbering, diversified among members of the library. In a further example, an exemplary heavy chain library includes members having amino acid residues Ala^{H31}, His^{H32}, Thr^{H33}, Asn^{H35}, Lys^{H95}, Gly^{H96}, Ser^{H97}, Asp^{H98}, Arg^{H99}, Leu^{H100}, Ser^{H100a}, Asp^{H100b}, Asn^{H100c} and Asp^{H100d}, based on Kabat numbering, diversified among members of the library. In one example, an exemplary heavy chain library includes members having amino acid residues Ala^{H31}, His^{H32}, Thr^{H33}, Asn^{H35}, diversified among members of the library.

[0381] In other examples, 2G12 variant libraries provided herein include 2G12 light chain variant libraries. For example, an exemplary heavy chain library includes members having amino acid residues in the CDRL3 varied. In particular, an exemplary library includes a light chain library having amino acid residues Ala^{L92}, Gly^{L93}, Tyr^{L94} and Ser^{L95}, based on Kabat numbering, diversified among members of the library. In a further example, an exemplary library includes a light chain library having amino acid residues Gln^{L89}, His^{L90}, Tyr^{L91} and Ala^{L92}, based on Kabat numbering, diversified among members of the library. In another example, an exemplary library includes a light chain library having amino acid residues Tyr^{L91}, Ala^{L92}, Tyr^{L94}, Ser^{L95} and Ala^{L96}, based on Kabat numbering, diversified among members of the library. In a further example, an exemplary library includes a light chain library having amino acid residues Tyr^{L91}, Ala^{L92}, Ser^{L95} and Ala^{L96}, based on Kabat numbering, diversified among members of the library. In other examples, an exemplary library includes a light chain library having amino acid residues Gln^{L89}, His^{L90}, Tyr^{L91}, Ala^{L92}, Gly^{L93}, Tyr^{L94}, Ser^{L95}, and Ala^{L96}, based on Kabat numbering, diversified among members of the library. In a further example, an exemplary library includes a light chain library having amino acid residues His^{L90}, Tyr^{L91}, Ala^{L92}, Gly^{L93}, Tyr^{L94}, Ser^{L95}, and Ala^{L96}, based on Kabat numbering, diversified among members of the library.

[0382] In examples of light chain libraries provided herein, an exemplary library includes a light chain library having amino acid residues added into the CDRL1, for example, at residues 95a and/or 95b. For example, an exemplary library includes a light chain library having amino acid residues Ala^{L92}, Gly^{L93}, Tyr^{L94} and Ser^{L95}, and additionally amino acid residues L95a and/or L95b, based on Kabat numbering, diversified among members of the library. In another example, an exemplary library includes a light chain library having amino acid residues His^{L90}, Tyr^{L91}, Ala^{L92}, Gly^{L93}, Tyr^{L94}, Ser^{L95}, and additionally amino acid residues L95a and/or L95b, based on Kabat numbering, diversified among members of the library.

[0383] In additional examples, 2G12 libraries provided herein include 2G12 hybrid variant libraries that include combinations of variant heavy chain and variant light chain libraries. In particular, an exemplary combination library includes members having amino acid residues Gln^{L89}, His^{L90}, Tyr^{L91}, Ala^{L92}, Gly^{L93}, Tyr^{L94}, Ser^{L95} and Ala^{L96} in the light chain varied among members of the library and amino acid residues Ala^{H31}, His^{H32}, Thr^{H33}, Asn^{H35}, Lys^{H95}, Gly^{H96}, Ser^{H97}, Asp^{H98}, Arg^{H99}, Leu^{H100}, Ser^{H100a}, Asp^{H100b}, Asn^{H100c} Asp^{H100d} and Pro^{H100e} in the heavy chain varied among members of the library. In another example, an exemplary combination library includes members having amino acid residues Ala^{L92}, Gly^{L93}, Tyr^{L94} and Ser^{L95} in the light chain varied among members of the library and amino acid residues Ala^{H31}, His^{H32}, Thr^{H33}, Asn^{H35}, Lys^{H95}, Gly^{H96}, Ser^{H97}, Asp^{H98}, Arg^{H99}, Leu^{H100}, Ser^{H100a}, Asp^{H100b}, Asn^{H100c} and Asp^{H100d} in the heavy chain varied among members of the library. In a further example, an exemplary combination library includes members having amino acid residues Gln^{L89}, His^{L90}, Tyr^{L91}, Ala^{L92}, Gly^{L93}, Tyr^{L94}, Ser^{L95} and Ala^{L96} in the light chain varied among members of the library and amino acid residues Ala^{H31}, His^{H32}, Thr^{H33}, Asn^{H35}, Lys^{H95}, Gly^{H96}, Ser^{H97}, Asp^{H98}, Arg^{H99}, Leu^{H100}, Ser^{H100a}, Asp^{H100b}, Asn^{H100c} and Asp^{H100d} in the heavy chain varied among members of the library. In an additional example, an exemplary combination library includes members having amino acid residues Ala^{L92}, Gly^{L93}, Tyr^{L94} and Ser^{L95} in the light chain varied among members of the library and amino acid residues Ala^{H31}, His^{H32}, Thr^{H33}, Asn^{H35}, Lys^{H95}, Gly^{H96}, Ser^{H97}, Asp^{H98}, Arg^{H99}, Leu^{H100}, Ser^{H100a}, Asp^{H100b}, Asn^{H100c} Asp^{H100d} and Pro^{H100e} in the heavy chain varied among members of the library. In other examples, an exemplary combination library includes members having amino acid residues His¹⁹⁰, Tyr^{L91}, Ala^{L92}, Gly^{L93}, Tyr^{L94}, Ser^{L95} in the light chain varied among members of the library and amino acid residues Lys^{H95}, Gly^{H96}, Ser^{H97}, Asp^{H98}, Arg^{H99}, Leu^{H100}, Ser^{H100a}, Asp^{H100b}, Asn^{H100c} and Asp^{H100d} in the heavy chain varied among members of the library.

[0384] ii. Randomization and Diversification Methods

[0385] Methods for generating nucleic acid libraries and resulting antibody libraries and for creating diversity in the libraries are well known in the art and can be employed to generate nucleic acid libraries and resulting antibody libraries of domain-exchanged antibody variants that can be screened for binding to a desired pathogen or cell. For example, the libraries can be used to screen for binding to Candida. Approaches for generating diversity include targeted and non-targeted approaches well known in the art.

[0386] Known approaches for generating diverse nucleic acid and polypeptide libraries include, but are not limited to:

[0387] non-targeted approaches (whereby diversity is introduced at random) such as recombination approaches (e.g. chain shuffling, (Marks et al., (1991) J. Mol. Biol. 222:581-597; Barbas et al., (1991) Proc. Natl. Acad. Sci. USA 88:7978-7982; Lu et al., (2003) Journal of Biological Chemistry 278(44):43496-43507; Clackson et al., (1991) Nature 352:624-628; Barbas et al., (1992) Proc. Natl. Acad. Sci. USA 89:10164; U.S. Pat. Nos. 6,291,161, 6,291,160, 6,291,159, 6,680,192, 6,291,158, and 6,969,586); and “sexual PCR” (Stemmer, (1994) Nature 340:389-391; Stemmer, (1994) Proc. Natl. Acad. Sci. USA 10747-10751; and U.S. Pat. No. 6,576,467; Boder et al., (2000) PNAS 97(20):10701-10705); and error-prone PCR (Zhou et al., (1991) Nucleic Acids Research 19(21):6052; Gram et al. (1992) Proc. Natl. Acad. Sci. USA 89:3576-3580; Rice et al., (1992) Proc. Natl. Acad. Sci. USA 89:5467-5471; Fromant et al., (1995) Analytical Biochemistry 224(1):347-353; Mondon et al., (2007) Biotechnol. J. 2:76-82; U.S. Application Publication No. 2004/0110294; Low et al., (1996) J. Mol. Biol. 260(3):359-368; Orencia et al., (2001) Nature Structural Biology 8(3):238-242; and Coia et al., (2001) J Immunol Methods 251(1-2):187-193);

[0388] targeted approaches (for mutating particular positions or portions), such as cassette mutagenesis (Wells et al., (1985) Gene 34:315-323; Oliphant et al., (1986) Gene 44:177-183; Borrego et al., (1995) Nucleic Acids Research 23, 1834-1835; Baca et al., (1997) The Journal of Biological Chemistry 272(16):10678-10684; Breyer and Sauer (1989) Journal of Biological Chemistry 264(22):13355-13360; Oliphant and Strul (1989) Proc. Natl. Acad. Sci. USA 86:9094-9098; U.S. Pat. No. 7,175,996; Borrego et al., (1995) Nucleic Acids Research 23:1834-1835; and Wells et al., (1985) Gene 34:315-323); mutual primer extension (Oliphant et al., (1986) Gene 44:177-183; Bryer and Sauer (1989) Journal of Biological Chemistry 264(22):13355-13360; Oliphant and Strul (1989) Proc. Natl. Acad. Sci. USA 86:9094-9098); template-assisted ligation and extension (Baca et al., (1997) The Journal of Biological Chemistry 272(16):10678-10684); codon cassette mutagenesis (Kegler-Ebo et al., (1994) Nucleic Acids Research, 22(9):1593-1599; Kegler-Ebo et al., (1996) Methods Mol. Biol., 57:297-310); oligonucleotide-directed mutagenesis (Brady and Lo, (2004) Methods Mol. Biol. 248:319-26; Rosok et al., (1998) The Journal of Immunology, 160:2353-2359); and amplification using degenerate oligonucleotide primers (U.S. Pat. Nos. 5,545,142, 6,248,516, and 7,189,841; Barbas et al., (1992) Proc. Natl. Acad. Sci. USA 89:4557-4461; Pini et al., (1998) The Journal of Biological Chemistry 273(34):21769-21776; Ho et al., (2005) The Journal of Biological Chemistry 280(1):607-617), including overlap and two-step PCR (Higuchi et al., (1988) Nucleic Acids Research 16(15):7351-7367; Jang et al., (1998) Molecular Immunology 35:1207-1217; Brady and Lo, (2004) Methods Mol Biol 248:319-26; Burks et al., (1997) Proc. Natl. Acad. Sci. USA 94:412-417; Dubreuil et al., (2005) The Journal of Biological Chemistry 280(26):24880-24887); and

[0389] combined approaches, such as combinatorial multiple cassette mutagenesis (CMCM) and related techniques (Crameri and Stemmer, (1995) Biotechniques, 18(2):194-6; US2007/0077572; De Kruif et al., (1995) J. Mol. Biol. 248:97-105; Knappik et al., (2000) J. Mol. Biol. 296(1):57-86; and U.S. Pat. No. 6,096,551).

[0390] Exemplary of methods for generating diverse nucleic acid libraries, and resulting antibody libraries, include the design, synthesis and assembly of oligonucleotides, such as any method are described in related U.S. Provisional Application Nos. 61/192,916, 61/192,982 and U.S. Publication Nos. 2010/0081575 and 2010/0093563 and International PCT Application Publication Nos. WO2010/033237 and WO2010/033229.

[0391] (1) Design, Synthesis and Assembly of Randomized Oligonucleotides

[0392] Variant antibodies can be generated from designed and generated synthetic oligonucleotides, whereby diversity is generated at selected amino acid residues using various doping strategies, such as biased or non-biased doping strategies. For example, one or more oligonucleotides can be synthesized based on a reference template sequence of a domain-exchanged antibody, for example, 2G12 or a non-binding 2G12. Generally, the oligonucleotides are generated such that they can be assembled in subsequent steps to form assembled duplex cassettes. For example, an oligonucleotide corresponding to a selected CDR desired to be varied (e.g. CDRH1, CDRH3 or CDRL3) is randomized and duplexes generated. Oligonucleotide duplexes are also generated for the portions of the reference or template (e.g. wildtype) sequence that is not being randomized. All the pieces can be ligated together to generate the entire variant light chain or variant heavy chain sequence. Generated sequences can be ligated into a vector for expression of the domain-exchanged antibody as described below.

[0393] Biased and non-biased doping strategies can be used during synthesis of randomized portions in pools of randomized oligonucleotides. One of skill in the art is familiar with strategies to introduce such doping strategies. Exemplary of a non-biased doping strategy is “NNN,” one whereby each of the four nucleotide monomers (A, G, T and C) is added at an equal proportion during synthesis of each nucleotide position in a randomized portion. Exemplary of biased doping strategies include NNK, NNB and NNS, and NNW; NNM, NNH; NND; NNV doping strategies and an NNT, NNA, NNG and NNC doping strategy. For example, in an NNK doping strategy, randomized portions of positive strands are synthesized using an NNK pattern and negative strand portions are synthesized using an MNN pattern, where N is any nucleotide (for example, A, C, G or T), K is T or G and M is A or C. Thus, using this doping strategy, each nucleotide in the randomized portion of the positive strand is a T or G.

[0394] Other doping strategies include randomization strategies that function on an amino acid level rather than a nucleic acid level and involve the simultaneous randomization of an entire three nucleotide codon to another fixed three nucleotide codon. In such a strategy, the three nucleotides composing the residue targeted for randomization are substituted for a specified codon using trimer phosphoramidites for any up to all of the amino acids. In one example, YGS or YGS+ randomization, the three nucleotides composing the residue targeted for randomization are substituted for a specified codon, for example tyrosine (Y=TAC), glycine (G=GGT) or serine (S=TCT) (or any other amino acids). The trimer phosphoramidites can be added to an oligonucleotide during its standard chemical synthesis. In this manner, randomization of a given residue is restricted to a desired set of amino acid substitutions. Additionally, this doping strategy prevents the insertion of stop codons thereby eliminating sequence truncations.

[0395] The randomized oligonucleotides can be assembled using any method known to one of skill in the art, in particular any method described in U.S. Provisional Application No. 61/192,960 and U.S. Publication No. 2010/0081575 and International PCT Application Publication No. WO2010/033237. For example, following oligonucleotide synthesis, synthetic oligonucleotides and/or duplexes generated from the oligonucleotides are used to generate duplexes, including intermediate duplexes and assembled duplexes, including assembled duplex cassettes. Synthetic oligonucleotides and/or duplexes from two or more, typically three or more, pools are assembled to form assembled duplexes. In one example, the assembled duplexes are large assembled duplexes. The large assembled duplexes can be generated by hybridization, polymerase reactions, amplification reactions, ligation, and/or combinations thereof.

[0396] In one example, oligonucleotides are assembled using random cassette mutagenesis and assembly (RCMA), whereby the oligonucleotide duplexes are generated by hybridizing positive and negative strand synthetic oligonucleotides. In another example, assembled duplexes are formed using an oligonucleotide fill-in and assembly (OFIA), whereby synthetic template oligonucleotides and synthetic oligonucleotide primers are hybridized, followed by polymerase extension. In another approach, assembled duplexes can be generated by duplex oligonucleotide ligation/single primer amplification (DOLSPA), whereby a plurality of synthetic oligonucleotides are combined to assemble intermediate duplexes by hybridization and ligation, which are used in an amplification reaction to form assembled duplexes. In a further example, assembled duplexes can be generated by modified fragment assembly and ligation/single primer amplification (mFAL-SPA), whereby pools of variant duplexes are generated containing restriction site overhangs that are compatible with restriction site overhangs contained in pools of reference sequence duplex that also are generated. The pools of duplexes are combined in a fragment assembly and ligation (FAL) step to form pools of intermediate duplexes that are assembled from the compatible overhangs, which are amplified using a single primer amplification (SPA) reaction. The assembled duplexes can be ligated into vectors for expression of antibody members. Example 2 herein exemplifies generation of a CDR L3 light chain library of 2G12 variants by diversification of amino acid residues using the mFAL-SPA method.

[0397] In another example, duplexes can be generated by overlap extension reaction/single primer amplification (OER-SPA) whereby two or more PCR products, amplified using primers containing randomized nucleotides, can be joined together by polymerase mediated extension of each product. In OER reactions, small segments of overlap between the PCR products allow each product to be extended, generating a duplex that incorporates each of the PCR products. These assembled PCR products can then be amplified using a single primer amplification (SPA) reaction. The potential for bias in OER reactions, due to the use of randomized oligonucleotides in the amplification of PCR products, can be avoided by other methods, such as randomization by extension reaction (RER). In RER, gene specific PCR primers are used to amplify regions flanking the region to be randomized but not incorporating the region. In a subsequent step, the PCR product or products can be combined with a randomized oligonucleotide that contains sequence overlapping the flanking PCR products. In the presence of polymerase, the PCR strands are extended to incorporate the randomized oligonucleotide. Multiple RER products containing randomized oligonucleotides can also be assembled together via the extension of each product via small overlapping regions. In another example, duplexes can be generated by overlap PCR (Overlap PCR), a variation on OER-SPA whereby the overlap extension reaction and single primer amplification are combined into one step. In another example, randomized oligonucleotide duplexes are generated using a fill-in reaction whereby oligonucleotides containing mutations in a CDR and flanking restriction sites are amplified by fill-in reaction with a single primer. These randomized CDR duplexes are digested with restriction enzymes and ligated directly into a similarly digested backbone vector.

[0398] A desired variant nucleic acid molecule can be introduced into any chosen vector or display vector, e.g. a pCAL vector described herein, using standard recombinant DNA techniques. The variant nucleic acids can be generated to contain nucleic acid restriction sites that are compatible with the vector for ease of swapping and replacing nucleic acid sequences encoding variant heavy and/or light chain sequences or portions thereof (e.g. CDR). It is within the level of the skill in the art to select a restriction site sequence to include, which depends primarily on the chosen vector.

[0399] b. Quick Libraries and Hybrid Libraries

[0400] The use of restrictions sites included in the variant oligonucleotides or nucleic acid molecules also permits the generation of “quick libraries,” whereby variant oligonucleotides can be quickly swapped out between and among vectors, thereby increasing the diversity of the library. For example, a nucleic acid molecule or oligonucleotide encoding a variant CDRH3 can be designed to include 5′ (e.g. BssHII) and 3′ (e.g. ApaI) restriction sites. In another example, variant nucleic acid molecules encoding a variant CDRH1 can be designed to include 5′ (e.g. BstBI) and 3′ (e.g. MluI) restriction sites. In a further example, variant nucleic acid molecules encoding a variant CDRL3 can be designed to include 5′ (e.g. SnaBI) and 3′ (e.g. MluI) restriction sites. The resulting nucleic acid molecules can be digested and ligated into vectors having compatible restriction sites. This permits generating “quick libraries,” whereby combinations of various permutations of variant nucleic acids are ligated into the same vector for expression and generation of variant antibodies varied only in the light chain, only in the heavy chain, or in both the heavy and light chains. For example, libraries can be generated containing only residues varied in a CDR of the light chain (e.g. CDRL3), or only residues in a CDR of the heavy chain (e.g. CDRH1 or CDRH3). Then, based on the presence of compatible restriction sites, quick libraries can be quickly generated by ligating into the same vector the nucleic acid portion for the CDRL3 and the CDRH1 and/or CDRH3.

[0401] Libraries of oligonucleotides encoding variant heavy chains or variant light chains can be quickly swapped out between and among libraries though the use of restriction sites included in the variant oligonucleotides or nucleic acid molecules, thereby generating hybrid libraries. For example, a nucleic acid molecule or oligonucleotide encoding a variant light chain can be designed to include 5′ (e.g., MfeI) and 3′ (e.g., Pad) restriction sites. In another example, variant nucleic acid molecules encoding a variant heavy chain can be designed to include 5′ (e.g., NotI) and 3′ (e.g., SalI) restriction sites. This permits generation of hybrid libraries whereby variant light chains can be ligated into a vector containing a library of variant heavy chains, or whereby variant heavy chains can be ligated into a vector containing a library of variant light chains. For example, hybrid libraries can be generated which contain the variant light chains from one nucleic acid library cloned into a vector containing the variant heavy chains from another nucleic acid library.

[0402] Hybrid libraries also can be generated from initial Hits identified in the selection and screening described below. For example, nucleic acid molecules encoding one or more variant light chains that were selected by screening can be pooled to generate a library of variant light chains that bind a specific target, i.e., C. albicans. The nucleic acid molecules encoding these variant light chains can be swapped directly into a library of nucleic acid molecules encoding variant heavy chains through the use of compatible restriction sites. In another example, nucleic acid molecules encoding one or more variant heavy chains that bind a specific target can be pooled to generate a library of variant heavy chains that can be digested and ligated directly into a library of nucleic acid molecules encoding variant light chains. In one example, a hybrid library is generated from pool of nucleic acid molecules encoding 93 different variant 2G12 light chains that bind to C. albicans (set forth in SEQ ID NOS: 91-143, 145-151, 249-279 and 282-283) and a vector containing a library of variant heavy chains.

[0403] 2. Display Libraries And Screening

[0404] Following generation of diverse libraries of variant polynucleotides, the variant polynucleotide members are ligated into vectors for expression in host cells to generate libraries of cells containing variant polynucleotides for expression of antibodies therefrom. Typically, variant polynucleotides are expressed in vectors that permit display on host cells. Antibody libraries herein include display libraries, which permit efficient and rapid screening and selection of antibody members against target antigens. Exemplary of display libraries are phage display libraries. In display libraries, each host cell or system displays a different member of the library permitting screening of the entire antibody repertoire in the library or a large sample therefrom.

[0405] Also, for purposes of display libraries herein, the vectors and host cells chosen permit display of the antibody in its domain-exchanged configuration. Typically, prior to selection of polypeptides from a collection, e.g. a phage display library, one or more methods is used to determine successful expression and/or display of the variant polypeptides. Such methods are well-known and include phage enzyme-linked immunosorbent assays (ELISAs) for detection of binding to a binding partner, and/or detection of an epitope tag on the expressed polypeptides, such as a His6 tag, which can be detected by binding to metal-chelating matrices or anti-His antibodies bound to solid supports.

[0406] a. Vectors

[0407] Generally, in display libraries, repertoires containing variable heavy chain and variable light genes can be separately cloned into a vector for expression on the surface of a host cell or system. In some examples, the variable heavy chain and light chain are cloned into different vectors. For example, variable heavy and variable light chain repertoires are cloned separately. The two vector libraries are then combined by co-transformation into a host cell so that each cell contains a different combination. In such examples, the variable heavy and light chains can recombine randomly to increase the diversity repertoire of the libraries. In other examples, the variable heavy chain and light chain are cloned into the same vector. The vectors typically are designed such that encoded polypeptides are fused to a protein that is expressed on the surface of a cell, such as a membrane protein or cell-surface associated protein, coat protein, or other similar protein or agent that facilitates display on a host cell.

[0408] For purposes of display libraries herein, the vectors and host cells chosen permit display of variant domain-exchanged antibody members in the library. Generally with conventional display methods, such as phage display methods, the displayed antibody fragment typically contains a single antibody combining site. By contrast, domain-exchanged antibodies contain an interface between the two interlocked V_{H} domains (V_{H}-V_{H}′ interface). Vectors are needed for displaying domain-exchanged fragments with two interlocked heavy chain variable regions (V_{H}), each paired with a light chain variable region (V_{L}).

[0409] Generally, the vectors include vectors containing stop codons, such as amber stop codons (UAG or TAG), ochre stop codons (UAA or TAA) and opal stop codons (UGA or TGA). Generally, such vectors contain a nucleic acid encoding a domain-exchanged antibody light chain operably linked at its 5′ end to the 3′ end of a leader sequence into which a stop codon has been introduced, and nucleic acid encoding an domain-exchanged antibody heavy chain operably linked at its 5′ end to the 3′ end of a leader sequence into which a stop codon has been introduced. In some examples, as discussed herein below, such vectors can be used to express soluble domain-exchanged antibodies, whereby the antibody or fragments are produced as non-fusion proteins by not including in the vector nucleic acid encoding a display protein, such as a phage-coat protein. For example, vectors that do not contain a stop codon in the leader sequence but that do contain a stop codon between the nucleic acid encoding the antibody and the coat protein, can be introduced into a non-suppressor host cell strain. Upon expression, there is no readthrough of the stop codon, so that only soluble antibody chains are expressed. Alternatively, to express the domain-exchanged antibody in the absence of fusion to a coat protein, the antibody chains can be introduced into any suitable vector that does not contain a coat protein.

[0410] For display purposes, the vector generally contains nucleic acid encoding a tag and a display protein to effect display of the antibody, for example a phage coat protein, downstream of the nucleic acid encoding the heavy chain. The nucleic acid encoding the tag is followed by a stop codon. The vector also can include nucleic acid encoding a light chain. Thus, when introduced into an appropriate partial suppressor cell, the heavy chain is expressed as a soluble protein (with a tag) and as a fusion protein with the tethering protein (e.g. phage coat protein), and the light chain is expressed only as a soluble protein. Exemplary of such a vectors include phagemid vectors, such as pCAL vectors described in U.S. Provisional Application Nos. 61/192,960, 61/192,982 and U.S. Publication Nos. 2010/0081575 and 2010/0093563.

[0411] Thus, typically, the vector contains a stop codon, generally an amber stop codon, between the nucleic acid encoding the antibody or fragment thereof and the nucleic acid encoding the display coat protein (e.g. cp3). Expression in a partial suppressor strain (e.g. a partial amber suppressor strain), however, results in “read-through,” translation that continues without being halted by the stop codon. Typically, depending on the suppressor strain, this “read-through” occurs only a certain percentage of the time. This partial read-through of the amber-stop results in a mixed collection of polypeptides. The mixed collection contains some polypeptide fusion proteins (i.e. antibody-coat protein fusion proteins) and some soluble polypeptides (i.e. soluble antibody), which are not part of coat protein fusions. In this case, a single genetic element encodes both the antibody and the coat protein, thus resulting in a single mRNA transcript that encodes both these polypeptides. Translation of the resulting transcript in a partial suppressor strain, therefore, produces a full length antibody-coat protein fusion protein when there is read through of the stop codon, and also a soluble antibody (i.e. truncated compared to the full length fusion protein because it does not contain the coat protein), is produced if there is no read through and translation terminates at the stop codon in the leader sequence. Thus, two copies of the antibody, e.g. two copies of an antibody fragment chain (e.g., two copies of the V_{H}-C_{H}1 chain or the V_{H}-linker-V_{L} chain), are expressed, one of which is part of a fusion protein and the other of which is a soluble protein. In the case of domain-exchanged antibodies, the soluble and fusion-protein chains interact on the surface of the genetic package, through conventional and/or artificial interactions (e.g. hydrophobic interactions, disulfide bonds and/or dimerization domains), to display domain-exchanged antibodies with two conventional antigen combining sites. Such suppressor host strains are well known and described (see, for example, Bullock et al., (1987) Biotechniques 5:376-379).

[0412] The vector optionally can contain additional stop codon(s), such as for expression of the domain-exchanged antibodies with reduced toxicity compared to the absence of the additional stop codons. For example, the polynucleotide encoding the protein of interest can be operably linked at the 5′ end to the 3′ end of a leader sequence in the vector, and a stop codon introduced into the leader sequence. This single genetic element encoding both the leader peptide and the domain-exchanged antibody or fragment thereof is operably linked to a promoter, thus resulting in a single mRNA transcript. Translation of the resulting transcript in a partial suppressor strain, therefore, produces a full length leader peptide-antibody fusion protein when there is read through of the stop codon, and a truncated leader peptide, without the antibody, when antibody there is no read through and translation terminates at the stop codon in the leader sequence. Thus, the antibody is translated and expressed only part of the time. In further examples, the vector contains two or more nucleic acid regions, each encoding a an antibody fragment, such as a heavy or light chain, for which reduced expression is desired, wherein each nucleic acid region is linked to a separate leader sequence and a stop codon is introduced into each leader sequence. For example, the vectors provided herein can contain nucleic acid encoding for a domain-exchanged antibody light chain that is operably linked to a leader sequence (e.g. the PelB leader sequence) and nucleic acid encoding for a domain-exchanged antibody heavy chain that is operably linked to another leader sequence (e.g. the OmpA leader sequence), wherein each leader sequence contains an amber stop codon. Thus, when introduced into a partial amber suppressor cell, expression of both the leader peptide-heavy chain fusion protein and leader peptide-light chain fusion protein is reduced compared to expression when the leader sequences do not contain the amber stop codons. The leader sequences are then cleaved from the light and heavy chains by bacterial peptidases following translocation across the cytoplasmic membrane.

[0413] The vectors can be used to display full-length domain-exchanged-antibodies, or domain-exchanged antibodies that are less then full-length, for example Fabs. Exemplary of the provided domain-exchanged fragments are fragments in which two chains (e.g. two V_{H}-C_{H}1 heavy chains or two V_{H}-linker-V_{L} single chains), encoded by the same genetic element (e.g. nucleotide sequence), are expressed on one phage as part of the domain-exchanged antibody fragment. Typically, in this example, one of the chains is expressed as a soluble, non-fusion protein (e.g. V_{H}-C_{H}1 or V_{H}-V_{L}) and the other is expressed as a phage coat protein fusion protein (e.g. V_{H}-C_{H}1-cp3 or V_{L}-V_{H}-cp3); in this example, however, the antibody chain portion of the two polypeptides is identical as they are encoded by the same genetic element. Exemplary of such domain-exchanged fragments are domain-exchanged Fab fragments and domain-exchanged scFv fragments. Also exemplary of the provided fragments are those (e.g. scFv tandem), containing multiple domains (e.g. V_{H}, V_{L}, C_{H}1, C_{L}) that are connected with peptide linkers to form the two heavy chain and two light chain domains of the domain-exchanged configuration. Exemplary of such fragments are domain-exchanged single chain Fab fragments and domain-exchanged scFv tandem fragments.

[0414] For example, for expression of Fab antibodies, vectors are generated containing a nucleic acid encoding a variable light chain domain operably linked at its 5′ end to the 3′ end of a leader sequence into which a stop codon has been introduced, and a nucleic acid encoding a variable heavy chain and C_{H}1 constant region operably linked at its 5′ end to the 3′ end of a leader sequence into which a stop codon has been introduced. Alternatively, other domain-exchanged antibody fragments can be expressed. For example, such additional fragments include a Fab hinge fragment, which contains an additional hinge sequence operably linked at the 5′ end of the Fab heavy chain sequence. Exemplary of such a fragment is a 2G12 Fab hinge fragment expressed from a vector containing the nucleotide sequence set forth in SEQ ID NO:179, or a variant thereof. In another example, an additional antibody fragment includes a scFv fragment, which contains one variable heavy chain (V_{H}) encoding sequence and one variable light (V_{L}) encoding sequence, followed by an amber stop codon, promoting formation of a domain-exchanged scFv fragment with two conventional antibody combining sites. Exemplary of such a fragment is a 2G12 scFv fragment expressed from a vector containing the nucleotide sequence set forth in SEQ ID NO:180, or a variant thereof. In an additional example, an antibody fragment includes an scFv tandem fragment, which includes the sequence for an additional V_{H} and an additional V_{L} region, separated by a linker sequence, for expression of two heavy chain variable domains and two light chain variable region domains from the single vector. Exemplary of a nucleic acid encoding a peptide linker are any that have the nucleotide sequence set forth in any of SEQ ID NOS: 181-187. Exemplary of a scFv tandem fragment is a 2G12 scFv tandem fragment expressed from a vector containing the nucleotide sequence set forth in SEQ ID NO:188, or a variant thereof. In a further example, an antibody fragment includes scFv hinge and scFv hinge(ΔE) fragments, each of which contains the sequence of the scFv encoding vector, with an additional hinge-region encoding sequence, to promote interaction between the two single chains in the fragment. Exemplary of an scFv hinge and scFv hinge(ΔE) fragments is a 2G12 domain-exchanged scFv hinge and scFv hinge(ΔE) fragments expressed from the vector containing the nucleotide sequence set forth in SEQ ID NO: 189, and SEQ ID NO: 190, respectively, or variants thereof. Further exemplary antibody fragments are 2G12 antibody fragments containing a mutation in the heavy chain variable region at residue 19 resulting in an Ile-Cys mutation to promote interaction of the two heavy chain variable regions. Such antibody fragments include, for example, 2G12 domain-exchanged Fab Cys19 fragment (expressed from the vector containing the nucleotide sequence set forth in SEQ ID NO: 191, or variants thereof containing Cys19, which contains a mutation in the heavy chain of the Fab fragment, resulting in an Ile-Cys mutation to promote interaction of the two heavy chain variable regions of the Fab fragment); the 2G12 domain-exchanged scFab ΔC²Cys19 (expressed from the vector containing the nucleotide sequence set forth in SEQ ID NO: 192, or variants thereof containing Cys 19, which contains the same mutation in the heavy chain of the Fab fragment, resulting in an Ile-Cys mutation, and contains a sequence encoding a linker between the heavy and light chains); and the 2G12 domain-exchanged scFv Cys19 fragment (expressed from the vector containing the nucleotide sequence set forth in SEQ ID NO: 193 or variants thereof containing Cys19, which contains the sequence of the scFv fragment with the mutation in the heavy chain variable region, resulting in an Ile-Cys mutation to promote interaction of the two heavy chain variable regions of the scFv fragment).

[0415] The vectors generally also contain an origin of replication; one or more selectable markers; other regulatory elements to enhance protein expression and regulation, for example, transcriptional enhance sequences, translational enhancer sequences, promoters, activators, translational start and stop signals, transcription terminators, cistronic regulators, polycistronic regulators; tag sequences to facilitate identification, separation, purification and/or isolation of the expressed polypeptide; or a ribosome binding site. One of skill in the art is familiar with components that can be used in vectors to control and/or enhance expression of encoded polypeptides therefrom. Such vectors can be generated by standard cloning and recombinant techniques well known in the art.

[0416] Also, for purposes of display, vectors can include phagemid vectors, which do not contain a sufficient set of phage genes for production of stable phage particles after transformation of host cells. Thus, in some examples, a library of polynucleotide variants can be incorporated into a phagemid vector. In a phagemid system, the nucleic acid encoding the display protein is provided on a phagemid vector, typically of length less than 6000 nucleotides. The phagemid vector includes a phage origin of replication so that the plasmid is incorporated into bacteriophage particles when bacterial cells bearing the plasmid are infected with helper phage, e.g. M13K01 or M13VCS or are transfected into analogous cells containing helper phage DNA, for example, DH5α VCSM13 dsDNA cells. Phagemids, however, lack a sufficient set of genes in order to produce stable phage particles after infection. These phage genes can be provided by a helper phage or analogous cells. For example, the necessary phage genes typically are provided by co-infection of the host cell with helper phage, for example M13K01 or M13VCS. Typically, the helper phage or analogous cells provides an intact copy of the gene III coat protein and other phage genes required for phage replication and assembly. Because the helper phage has a defective origin of replication, the helper phage genome is not efficiently incorporated into phage particles relative to the plasmid that has a wild type origin. Thus, the phagemid vector includes a bacterial origin of replication and a phage origin of replication so that the plasmid is incorporated into bacteriophage particles when bacterial cells bearing the plasmid are infected with helper phage, e.g. M13K01 or M13VCS. See, e.g., U.S. Pat. No. 5,821,047. The phagemid genome typically contains a selectable marker gene, e.g. Amp^{R} or Kan^{R} (for ampicillin or kanamycin resistance, respectively) for the selection of cells that are infected by a member of the library. Exemplary phagemid vectors include, but are not limited to, pBluescript, pBK-CMV®(Stratagene) and pCAL vectors, which contain a sequence of nucleotides encoding the C-terminal domain of filamentous phage M13 Gene III coat protein.

[0417] i. pCAL Phagemid Vectors

[0418] pCAL vectors contain nucleic acid encoding part (e.g. the C terminus) of the filamentous phage M13 gene III coat protein. The vectors also include a leader sequence encoding a leader peptide, a multiple cloning site, an amber stop codon (TAG) and a tag upstream of the coat protein, such that nucleic acid, such as nucleic acid encoding an antibody or fragment thereof, can be inserted at the cloning site 5′ to the amber stop codon, which is 5′ to the tag and the coat protein. Thus, upon expression in a partial amber suppressor cell, both antibody-coat protein fusion protein (with a tag) and soluble antibody proteins are produced facilitating display of domain-exchanged antibodies, including domain-exchanged antibody fragments. The encoded domain-exchanged antibody can be full-length, or less then full-length, for example, a Fab, a Fab hinge fragment, an scFv fragment, scFv tandem fragment, scFv hinge and scFv hinge(ΔE), or mutations thereof (for example, Cys19 in 2G12). The vectors can contain one or more leader sequences, for the secretion of one or more polypeptides.

[0419] In some examples, the pCAL vectors further contain a stop codon, such as an amber stop codon, in the leader sequence encoding a leader peptide. For example, a pCAL vector can contain a nucleic acid encoding a domain-exchanged antibody light chain operably linked at its 5′ end to the 3′ end of a leader sequence into which a stop codon has been introduced, and nucleic acid encoding an domain-exchanged antibody heavy chain operably linked at its 5′ end to the 3′ end of a leader sequence into which a stop codon has been introduced. When introduced into an appropriate partial suppressor cell, the heavy chain is expressed as a soluble protein (with a tag) and as a fusion protein with the phage coat protein, and the light chain is expressed as a soluble protein. Inclusion of the stop codon in the leader sequences linked to the nucleic acid encoding the heavy and light chains facilitates reduced expression of the these proteins in corresponding partial suppressor cells (i.e. amber partial suppressor cells if amber stop codons is introduced), thus reducing the toxicity of these proteins to the host cell. Examples of leader sequences include the PelB leader sequence (the nucleic acid encoding the leader peptides from the pectate lyase protein from Erwinia carotovora and the OmpA leader sequence (the nucleic acid sequence encoding the leader peptide from the E. coli outer membrane protein). Generally, the leader sequences of the heavy and light chain are different. In other example, the vectors include just one leader sequence. For example, a vector can include one leader sequence 5′ to nucleic acid encoding a V_{H}-linker-V_{L} single chain. From such a vector, domain-exchanged scFv fragments can be displayed.

[0420] Vectors also can include further sequences that control expression. For example, the single genetic element containing these leader and antibody chain sequences can be operably linked to the lactose promoter and operator, such that their expression is regulated by lactose or an appropriate lactose substitute, such as IPTG. In addition, vectors can include a truncated or full length lac I gene, which encodes the lactose repressor molecule. In the absence of lactose or another suitable inducer, such as IPTG, the repressor binds to the operator and interferes with binding of the RNA polymerase to the promoter, inhibiting transcription of the operably linked heavy and light chain genes. In the presence of lactose or a suitable equivalent, such as IPTG, the lactose metabolite allolactose binds to the repressor, causing a conformational change that renders the repressor unable to bind to the operator, thereby allowing binding of the RNA polymerase and transcription of a single transcript encoding the domain-exchanged antibody light and heavy chains. Ribosome binding sites also can be included upstream of leader sequences.

[0421] Different pCAL vectors provided herein can result in different amounts of readthrough through the amber-stop codon. For example, the pCAL G13 vector (SEQ ID NO:5) contains a guanine residue at the position just 3′ of the amber stop codon, while the pCAL A1 vector contains an adenine at this position. Choice of vector can determine how the relative amount of read-through that occurs through the stop codon, e.g. when using a partial suppressor strain, and thus can regulate the relative amount of fusion versus non-fusion target/variant polypeptide translated from the vector, as well as the amount of overall expression in instances where a stop codon is present in the leader sequence encoding the leader peptide. Additionally, as described below, different partial suppressor cells can have varying suppression efficiency, such that more or less read-through is observed depending on the strain of partial suppressor cell into which the vector is introduced.

[0422] A desired variant nucleic acid molecule can be introduced into a pCAL vector using standard recombinant DNA techniques. Exemplary pCAL vectors include those having the sequence of nucleic acids set forth in any of SEQ ID NOS: 5 (pCAL G13), 194 (pCAL A1), 6 (2G12 pCAL G13), 195 (3-ALA 2G12 pCAL G13), 196 (3-ALA LC 2G12 pCAL G13), 197 (2G12 pCAL A 1), 1 (2G12 pCAL IT*) and 12 (2G12 pCAL ITPO). In some instances, the variant nucleic acid molecules, such as variant heavy and/or light chains, are introduced into the multiple cloning site of pCAL G13 (SEQ ID NO:5) or pCAL A1 (SEQ ID NO:194). In other instances, the variant nucleic acid molecules, such as variant heavy and/or light chains, are introduced by replacement of the existing heavy and/or light chain nucleic acid molecules in any of 2G12 pCAL G13 (SEQ ID NO:6), 3-ALA 2G12 pCAL G13 (SEQ ID NO:195), 3-ALA LC 2G12 pCAL G13 (SEQ ID NO:196), 2G12 pCAL A1 (SEQ ID NO:197), 2G12 pCAL IT* (SEQ ID NO:1) and 2G12 pCAL ITPO (SEQ ID NO:12). For example, the variant nucleic acids can be generated to contain nucleic acid restriction sites that are compatible with the vector for ease of swapping and replacing nucleic acid sequences encoding heavy and/or light chain sequences. Example 2 exemplifies replacement of variant light chains into the 2G12 3 Ala LC pCAL IT* vector (set forth in SEQ ID NO:23) by digestion of the vector with MfeI and PacI and ligation of compatible variant light chain duplex assembled oligonucleotide fragments. Following ligation, vector libraries are generated each containing a randomized 2G12 encoding nucleic acid members, whereby variation is in the CDR L3 region of the light chain. Similarly, other pCAL vectors, such as 2G12 pCAL IT*, 2G12 pCAL, or 2G12 pCAL IT* 3-Ala can similarly be digested with Mfe I and Pac I for insertion of assembled duplex oligonucleotides encoding variant light chains. In another example, 2G12 pCAL IT* vectors or the 2G12 pCAL vector, or any 3-ALA variant thereof, can be digested with Sal I and Not I for ligation of assembled duplex oligonucleotides encoding variant heavy chains.

[0423] To express the protein(s) from the provided vectors that contain stop codon nucleic acids, the vectors are transformed into an appropriate partial suppressor host cell strain. Different partial suppressor cells can have varying suppression efficiency, such that more or less read-through is observed depending on the strain of partial suppressor cell into which the vector is introduced. The host cell chosen generally depends on the stop codon incorporated into the vector. For example, if one or more amber stop codons are introduced into the vector, then the vector is transformed into a partial amber suppressor strain that harbors an amber suppressor tRNA molecule. If one or more ochre stop codons are introduced into vector, the vector is transformed into a partial ochre suppressor strain that harbors an ochre suppressor tRNA molecule. Further, a host cell typically is chosen in which the suppressor tRNA molecule will incorporate the desired amino acid residue when read through of the stop codon occurs (such as the wild-type amino acid or another desired amino acid). For example, if the vector contains an amber stop codon that was introduced in place of a glutamine codon (or where a glutamine is desired), then the vector can be introduced into a partial amber suppressor strain that expresses an amber suppressor tRNA that incorporates a glutamine residue at the TAG codon. It is within the level of one of skill in the art to choose the appropriate host cell. Exemplary amber suppressor cells (including partial amber suppressor cells) include, but are not limited to, XL1-Blue, DB3.1, DH5α, DH5αF′, DH5αF′IQ, DH5α-MCR, DH21, EB5α, HB101, RR1, JM101, JM103, JM106, JM107, JM108, JM109, JM110, LE392, Y1088, C600, C600hfl, MM294, NM522, Stb13 and K802 cells.

[0424] The vector can be introduced into the partial amber suppressor cell using any method known in the art, including, but not limited to, electroporation and chemical transformation. Following transformation into an appropriate partial suppressor strain, in some instances, expression of the polypeptides can be induced in the host cells. For example, if transcription is under control of a regulatable promoter, then the appropriate conditions can be generated to induce transcription. Further, in some examples, the host cells are phage-display compatible host cells, and are used to display the protein(s) of interest on the surface of a bacteriophage, for example, in a phage display library. By generating phage display libraries, the proteins displayed on the phage can be screened, analyzed and selected for based on various properties, such as binding activities. such as described in more detail below.

[0425] b. Display Methods

[0426] Methods for displaying polypeptides on the surface of genetic packages, e.g. in libraries, are well known and include, for example, phage display (see, e.g., Barbas, C. F., 3rd et al., 2001. Phage Display: A Laboratory Manual. Cold Spring Harbor Laboratory Press, Cold Spring Harbor, N.Y.; Clackson et al., (1991) Nature, 352:624-628) and methods for display on other genetic packages. Domain-exchanged antibodies can be displayed on the surface of any genetic package. Exemplary genetic packages include, but are not limited to, bacterial cells, bacterial spores, viruses, including bacterial DNA viruses, for example, bacteriophages, typically filamentous bacteriophages, for example, Ff, M13, fd, and f1 (see, e.g., Barbas, C. F., 3rd et al., 2001. Phage Display: A Laboratory Manual. Cold Spring Harbor Laboratory Press, Cold Spring Harbor, N.Y.; Clackson et al., (1991) Nature, 352:624-628; Glaser et al. (1992) J. Immunol., 149:3903 3913; Hoogenboom et al. (1991) Nucleic Acids Res., 19:4133-41370; Clackson and Lowman, Phage Display: A Practical Approach; (2004) Oxford University Press (Chapter 1, Russel et al., An introduction to Phage Biology and Phage Display, p. 1-26; Chapter 2, Sidhu and Weiss Constructing Phage display libraries by oligonucleotide-directed mutagenesis, p 27-41)), baculoviruses (see, e.g., Boublik et al., (1995) Bio/Technology, 13:1079-1084). Typically, polypeptides are displayed on genetic packages in collections of genetic packages, such as phage display libraries, which can be used to select particular polypeptides from the collections using the provided methods. Display of the polypeptides on genetic packages allows selection of polypeptides having desired properties, for example, the ability to bind with a particular binding partner.

[0427] i. Phage Display

[0428] Typically, the genetic packages are phage, and the polypeptides are expressed with phage display. Methods for generating phage display libraries are well known (see Barbas, C. F., 3rd et al., 2001. Phage Display: A Laboratory Manual. Cold Spring Harbor Laboratory Press, Cold Spring Harbor, N.Y.; Clackson and Lowman, Phage Display: A Practical Approach; (2004) Oxford University Press (Clackson and Lowman, Phage Display: A Practical Approach; (2004) Oxford University Press (Chapter 1, Russel et al., An introduction to Phage Biology and Phage Display, p. 1-26; Chapter 2, Sidhu and Weiss Constructing Phage display libraries by oligonucleotide-directed mutagenesis, p 27-41)).

[0429] For phage display, libraries of domain-exchanged antibodies, including domain-exchanged antibody fragments can be expressed on the surfaces of bacteriophages, such as, but not limited to, M13, fd, f1, T7, and λ phages (see, e.g., Santini (1998) J. Mol. Biol. 282:125-135; Rosenberg et al. (1996) Innovations 6:1-6; Houshmand et al. (1999) Anal Biochem 268:363-370, Zanghi et al. (2005) Nuc. Acid Res. 33(18)e160:1-8). Phage display is described, for example, in Ladner et al., U.S. Pat. No. 5,223,409; Rodi et al. (2002) Curr. Opin. Chem. Biol. 6:92-96; Smith (1985) Science 228:1315-1317; WO 92/18619; WO 91/17271; WO 92/20791; WO 92/15679; WO 93/01288; WO 92/01047; WO 92/09690; WO 90/02809; de Haard et al. (1999) J. Biol. Chem. 274:18218-30; Hoogenboom et al. (1998) Immunotechnology 4:1-20; Hoogenboom et al. (2000) Immunol Today 2:371-8; Fuchs et al. (1991) Bio/Technology 9:1370-1372; Hay et al. (1992) Hum Antibod Hybridomas 3:81-85; Huse et al. (1989) Science 246:1275-1281; Griffiths et al. (1993) EMBO J. 12:725-734; Hawkins et al. (1992) J Mol Biol 226:889-896; Clackson et al. (1991) Nature 352:624-628; Gram et al. (1992) PNAS 89:3576-3580; Garrard et al. (1991) Bio/Technology 9:1373-1377; Rebar et al. (1996) Methods Enzymol. 267:129-49; Hoogenboom et al. (1991) Nuc Acid Res 19:4133-4137; and Barbas et al. (1991) PNAS 88:7978-7982.

[0430] Phage display systems typically utilize filamentous phage, such as M13, fd, and f1. In some examples using filamentous phage, the display protein is fused to a phage coat protein anchor domain. The fusion protein can be co-expressed with another polypeptide having the same anchor domain, e.g., a wild-type or endogenous copy of the coat protein. Phage coat proteins that can be used for protein display include (i) minor coat proteins of filamentous phage, such as the bacteriophage M13 gene III protein (also called gIIIp, cp3, g3p; GENBANK g.i. 59799327, having the amino acid sequence set forth in SEQ ID NO: 198). Portions of these phage proteins also can be used. In one example, the anchor domain of gIIIp is used (see, e.g., U.S. Pat. No. 5,658,727). In another example, gVIIIp is used (see, e.g., U.S. Pat. No. 5,223,409), which can be a mature, full-length gVIIIp fused to the display protein. Generally, to produce the fusion protein, polypeptides are fused to bacteriophage coat proteins with covalent, non-covalent, or non-peptide bonds. (See, e.g., U.S. Pat. No. 5,223,409, Crameri et al. (1993) Gene 137:69 and WO 01/05950). For example, nucleic acids encoding the variant polypeptides can be fused to nucleic acids encoding the coat proteins (e.g. by introduction into a vector encoding the coat protein) to produce a polypeptide-coat protein fusion protein, where the polypeptide is displayed on the surface of the bacteriophage. Additionally, the fusion protein can include a flexible peptide linker or spacer, a tag or detectable polypeptide, a protease site, or additional amino acid modifications to improve the expression and/or utility of the fusion protein. For example, addition of a protease site can allow for efficient recovery of desired bacteriophages following a selection procedure. Exemplary tags and detectable proteins are known in the art and include for example, but not limited to, a histidine tag, a hemagglutinin tag, a myc tag or a fluorescent protein.

[0431] For display of polypeptides on phage, host cells capable of phage infection and packaging are transformed with phage vectors, typically phagemid vectors, containing polynucleotides encoding the polypeptides. Any phagemid vector can be used, including for example, any discussed above. In one example, the host cells are partial suppressor cells, such as any of the cells described above, provided the cells are compatible with phage display. Any method of transformation known to one of skill in the art can be used, for example, electroporation or other known transformation methods.

[0432] The transformed cells can be grown for amplification of the vector nucleic acids, for example, for subsequence sequence analysis or pooling for re-transformation. Following amplification, phage packaging and protein expression is induced, typically by co-infection with a helper phage. Exemplary of helper phage is VCS M13 helper phage. Methods for transformation, growth and phage packaging and propagation are well-known (see Clackson and Lowman, Phage Display: A Practical Approach; (2004) Oxford University Press (Chapter 2, Constructing Phage display libraries by oligonucleotide-directed mutagenesis, Sidhu and Weiss, p. 27-41). Any phage display method can be used. In general, host cells transformed with the vector nucleic acids are incubated in medium. Helper phage is added and the cells are incubated. Typically, polypeptide expression is induced, for example, by IPTG. Generally, the polypeptides are exported to the periplasm (e.g. as part of a fusion protein) for assembly into phage during phage packaging. Following phage packaging, the polypeptides are expressed on the surface of phage, typically as part of fusion proteins, each containing a polypeptide of interest and a portion of a phage coat protein. The phage can be isolated, for example, by precipitation, and then assayed and/or used for selection of desired variant polypeptides.

[0433] ii. Other Display Methods

[0434] Other known display methods can be used. Display systems include, for example, prokaryotic or eukaryotic cells. Exemplary of systems for cell surface expression include, but are not limited to, bacteria, yeast, insect cells, avian cells, plant cells, and mammalian cells (Chen and Georgiou (2002) Biotechnol Bioeng 79: 496-503). In one example, the bacterial cells for expression are Escherichia coli.

[0435] (1) Cell Surface Display

[0436] Polypeptides can be displayed as part of a fusion protein with a protein that is expressed on the surface of the cell, such as a membrane protein or cell surface-associated protein. For example, a polypeptide can be expressed in E. coli as a fusion protein with an E. coli outer membrane protein (e.g. OmpA), a genetically engineered hybrid molecule of the major E. coli lipoprotein (Lpp) and the outer membrane protein OmpA or a cell surface-associated protein (e.g. pili and flagellar subunits). Generally, when bacterial outer membrane proteins are used for display of heterologous peptides or proteins, expression is achieved through genetic insertion into permissive sites of the carrier proteins. Expression of a heterologous peptide or protein is dependent on the structural properties of the inserted protein domain, since the peptide or protein is more constrained when inserted into a permissive site as compared to fusion at the N- or C-terminus of a protein. Modifications to the fusion protein can be done to improve the expression of the fusion protein, such as the insertion of flexible peptide linker or spacer sequences or modification of the bacterial protein (e.g. by mutation, insertion, or deletion, in the amino acid sequence). Enzymes, such as β-lactamase and the Cex exoglucanase of Cellulomonas fimi, have been successfully expressed as Lpp-OmpA fusion proteins on the surface of E. coli (Francisco J. A. and Georgiou G. (1994) Ann N Y Acad. Sci. 745:372-382 and Georgiou G. et al. (1996) Protein Eng. 9:239-247). Other peptides of 15-514 amino acids have been displayed in the second, third, and fourth outer loops on the surface of OmpA (Samuelson et al. (2002) J. Biotechnol. 96: 129-154). Thus, outer membrane proteins can carry and display heterologous gene products on the outer surface of bacteria.

[0437] In another example, polypeptides are fused to autotransporter domains of proteins such as the N. gonorrhoeae IgA1 protease, Serratia marcescens serine protease, the Shigella flexneri VirG protein, and the E. coli adhesin AIDA-I (Klauser et al. (1990) EMBO J. 1991-1999; Shikata S, et al. (1993) J Biochem. 114:723-731; Suzuki T et al. (1995) J Biol. Chem. 270:30874-30880; and Maurer J et al. (1997) J Bacteriol. 179:794-804). Other autotransporter proteins include those present in gram-negative species (e.g. E. coli, Salmonella serovar Typhimurium, and S. flexneri). Enzymes, such as β-lactamase, have been successful expressed on the surface of E. coli using this system (Lattemann C T et al. (2000) J. Bacteriol. 182(13): 3726-3733).

[0438] Bacteria can be recombinantly engineered to express a fusion protein, such a membrane fusion protein. Polynucleotides encoding the polypeptides for display can be fused to nucleic acids encoding a cell surface protein, such as, but not limited to, a bacterial OmpA protein. The nucleic acids encoding the polypeptides can be inserted into a permissible site in the membrane protein, such as an extracellular loop of the membrane protein. Additionally, a nucleic acid encoding the fusion protein can be fused to a nucleic acid encoding a tag or detectable protein. Such tags and detectable proteins are known in the art and include for example, but not limited to, a histidine tag, a hemagglutinin tag, a myc tag or a fluorescent protein. The nucleic acids encoding the fusion proteins can be operably linked to a promoter for expression in the bacteria, For example nucleic acid can be inserted in a vectors or plasmid, which can carry a promoter for expression of the fusion protein and optionally, additional genes for selection, such as for antibiotic resistance. The bacteria can be transformed with such plasmids, such as by electroporation or chemical transformation. Such techniques are known to one of ordinary skill in the art.

[0439] Proteins in the outer membrane or periplasmic space usually are synthesized in the cytoplasm as premature proteins, which are cleaved at a signal sequence to produce the mature protein that is exported outside the cytoplasm. Exemplary signal sequences used for secretory production of recombinant proteins for E. coli are known. The N-terminal amino acid sequence, without the Met extension, can be obtained after cleavage by the signal peptidase when a gene of interest is correctly fused to a signal sequence. Thus, a mature protein can be produced without changing the amino acid sequence of the protein of interest (Choi and Lee, (2004) Appl. Microbiol. Biotechnol. 64: 625-635).

[0440] Other known cell surface display methods can be used, including, but not limited to, ice nucleation protein (Inp)-based bacterial surface display system (Lebeault J. M., (1998) Nat. Biotechnol. 16:576-580), yeast display (e.g. fusions with the yeast Aga2p cell wall protein; see U.S. Pat. No. 6,423,538), insect cell display (e.g. baculovirus display; see Ernst et al. (1998) Nucleic Acids Research, 26(7):1718-1723), mammalian cell display, and other eukaryotic display systems (see e.g. U.S. Pat. No. 5,789,208 and WO 03/029456). The vectors provided herein can be used in any of these systems to display a domain-exchanged antibody, provided that the host cells contain an appropriate functional suppressor tRNA and that the vectors contain the appropriate elements for replication, amplification, transcription and translation in the host cell.

[0441] (2) Other Display Systems

[0442] Other display formats also can be used. Exemplary other display formats include nucleic acid-protein fusions, ribozyme display (see e.g. Hanes and Pluckthun (1997) Proc. Natl. Acad. Sci. U.S.A. 13:4937-4942), bead display (Lam, K. S. et al., (1991) Nature 354, 82-84; Houghten, R. A. et al., (1991) Nature, 354:84-86; Furka, A. et al., (1991) Int. J. Peptide Protein Res. 37:487-493; Lam, K. S., et al., (1997) Chem. Rev., 97:411-448; U.S. Published Pat. No. 2004-0235054) and protein arrays (see e.g. Cahill (2001) J. Immunol. Meth. 250:81-91, WO 01/40803, WO 99/51773, and US2002-0192673-A1).

[0443] In specific other cases, it can be advantageous to instead attach the polypeptides, or phage libraries or cells expressing variant polypeptides, to a solid support. For example, in some examples, cells expressing polypeptides can be naturally adsorbed to a bead, such that a population of beads contains a single cell per bead (Freeman et al. (2004) Biotechnol. Bioeng. 86:196-200). Following immobilization to a glass support, microcolonies can be grown and screened with a chromogenic or fluorogenic substrate. In another example, variant polypeptides or phage libraries or cells expressing variant polypeptides can be arrayed into titer plates and immobilized.

[0444] c. Screening

[0445] The variant domain-exchanged antibody libraries provided herein, for example variant 2G12 antibody libraries, can be used to screen for antibodies that specifically bind to epitopes on'pathogens or cells, for example, carbohydrate or glycolipid epitopes. Unlike conventional antibodies, the antigen-binding site of domain-exchanged antibodies are suited for binding to such epitopes. Hence, members of the domain-exchanged variant antibody libraries are Candidates for recognizing carbohydrate and glycolipid epitopes on the surface of pathogens (e.g. bacterial, viral or fungal) and cells. The libraries can be used in screening assays against such antigens. The identified antibodies can be used for therapeutic, diagnostic and research purposes against the selected antigen.

[0446] Any pathogenic cell or other cell can be used in the screening assays herein to identify or select antibodies. Exemplary pathogens include any that are involved in or associated with a disease or condition. Such pathogens are known to one of skill in the art. It is within the level of skill in the art to select any pathogenic cell to use in the screening assays herein for use in identifying or selecting antibodies specific thereto. Pathogens can be obtained by any method known to one of skill in the art, for example, isolated from serum and/or blood of an infected individual or obtained as a clinical isolate or other stable pathogen stock from ATCC or other similar depository. The pathogens can be activated or inactivated. In addition, as described below, whole pathogenic cells can be used in the screening assays. Exemplary of such methods provided herein are methods of screening to select for domain-exchanged antibodies against Candida.

[0447] Methods for selection of domain-exchanged antibodies from antibody libraries for identification of any bind Candida can be adapted based on screening methods well-known in the art. Generally, an antigen or epitope of Candida or whole Candida cells are presented to the collection of library of variant domain-exchanged antibodies and the collection enriched for members that bind, for example, with high affinity, to

[0448] Candida. For purposes herein, any strain of Candida can be used, including but not limited to, Candida albicans (serotype A or B), Candida krusei, Candida tropicalis or Candida glabrata. Such strains can be obtained from American Type Culture Collection (ATCC). For example, exemplary strains include ATCC No. 10231; ATCC No. 12061; ATCC No. 44373; and ATCC No. 36803. Alternatively, strains can be obtained as clinical isolates. Typically, selection is done on fixed whole cells. Alternatively, selection can be done on cell wall preparations of Candida. Example 4 describes an exemplary screening assay of an exemplary variant light chain 2G12 domain-exchanged antibody library against formalin-fixed C. albicans cells as the target antigen. The target antigen can be incubated with the library, such as a phage display library, for a sufficient time to permit binding. Following incubation, the cell-library mixture is washed and non-binding library members are washed away using one or more wash buffers, generally supplemented with polysorbate 20 (Tween 20). The stringency of the wash can be adjusted according to methods well known to the skilled artisan. Conditions of the binding and washing steps can be varied to adjust stringency, according to various parameters, for example, affinity of the target or desired polypeptide for the binding partner.

[0449] After, washing to remove unbound library members, for example, unbound phage, bound library members can be eluted. For example, after washing to remove non-bound phage, the phage-expressing variant domain-exchanged antibodies that have bound to the Candida target antigen are eluted using one of several well known elution methods, typically by reduction of the pH of the solution, recovery of phage, and neutralization, or addition of a competing polypeptide which can compete for binding to the binding partner. Exemplary of the elution step is reduction of the pH to approximately 2 (e.g. 2.2) by incubation of the bound phage with 10-100 mM hydrochloric acid (HCl), pH 2.2, or with 0.2 M glycine, (e.g. for 10 minutes at room temperature (e.g. 25° C.)), followed by removal of the eluate and addition of 1-2 M Tris-base (pH 8.0-9.0) to neutralize the pH. In some examples, multiple elution steps are carried out and the eluates pooled for subsequent steps.

[0450] Domain-exchanged antibodies selected in the screening can be amplified for analysis and/or use in subsequent screening steps. The amplification step amplifies the genome of the genetic package, e.g. phage. This amplification can be useful for expressing the polypeptide encoded by the selected phage, for example, for use in analysis steps or subsequent panning steps in iterative selection processes, and for identification of the variant polypeptide and polynucleotide encoding the polypeptide, such as by subsequent nucleic acid sequencing. For example, following elution, the phage nucleic acids are amplified in an appropriate host cell. In one example, the selected phage is incubated with an appropriate host cell (e.g. XL1-Blue cells) to allow phage adsorption (for example, by incubation of eluted phage with cells having an O.D. between 0.3 and 0.6 for 20 minutes at room temperature). After this incubation to allow phage adsorption, a small volume of nutrient broth is added and the culture agitated to facilitate phage DNA replication in the multiplying host cell. After this incubation, the culture typically is supplemented with an antibiotic and/or inducer and the cells grown until a desired optical density is reached. The phage genome can contain a gene encoding resistance to an antibiotic to allow for selective growth of the cells that maintain the phage vector DNA. The amplification of the display source, such as in a bacterial host cell, can be optimized in a variety of ways. For example, the host cells can be added in vast excess to the genetic packages recovered by elution, thereby ensuring quantitative transduction of the genetic package genome. The efficiency of transduction optionally can be measured when phage are selected.

[0451] Selected domain-exchanged antibodies can be purified and analyzed. For example, following infection of E. coli host cells with selected phage as set forth above, the individual clones can be picked and grown up for plasmid purification using any method known to one of skill in the art. The purified plasmid can used for nucleic acid sequencing to identify the sequence of the variant polynucleotide and, by extrapolation, the sequence of the variant polypeptide, or can be used to transfect into any cell for expression, such as by not limited to, a mammalian expression system. Purified proteins also can be tested in subsequent in vitro or in vivo assays for binding activity.

[0452] The method of screening collections of displayed polypeptides can be performed in an iterative process by multiple rounds of panning. Such iteration permits identification of antibodies with improved binding affinity. Generally, selected polypeptides are used in multiple additional rounds of screening, by pooling the selected polypeptides (e.g. eluted phage), propagation of nucleic acids encoding the polypeptides in host cells, expression (e.g. phage display) of the selected polypeptides, and a subsequent round of panning. Multiple rounds, e.g. 2, 3, 4, 5, 6, 7, 8, or more rounds, of screening can be performed. In this example of iterative screening, the variant polypeptide collection used in the successive round of screening includes the polypeptides selected in the previous round. Alternatively, the multiple rounds of screening can be performed using the initial collection of polypeptides. In an alternative example of iterative screening, a new polypeptide collection can be generated, that has been further varied. In one such example, one or more selected variant polypeptides is/are used as target polypeptides for variation.

[0453] Following selection and identification, selected antibodies can be further characterized for binding to antigen as it exists in its natural state, typically whole cells. Binding of antibody to pathogens, cells or other source can be determined by established methodologies, for example, ELISA, flow cytometry and immunohistochemistry as described herein below. Binding affinity also can be determined. Any method known to one of skill in the art can be used to measure the binding affinity of an antibody. For example, the binding properties of an antibody can be assessed by performing a saturation binding assay, for example, a saturation ELISA, whereby binding to an antigen is assessed with increasing amounts of antibody. In such experiments, it is possible to assess whether the binding is dose-dependent and/or saturable. In addition, the binding affinity can be extrapolated from the 50% binding signal. Typically, apparent binding affinity is measured in terms of its association constant (Ka) or dissociation constant (Kd) and determined using Scatchard analysis (Munson et al., (1980) Anal. Biochem., 107:220). For example, binding affinity to a target protein can be assessed in a competition binding assay in where increasing concentrations of unlabeled protein is added, such as by radioimmunoassay (RIA) or ELISA. It is understood that the binding affinity of an antibody can vary depending on the assay and conditions employed, although all assays for binding affinity provide a rough approximation. By performing various assays under various conditions it is possible to estimate the binding affinity of an antibody.

[0454] Further, selected antibodies also can be assessed for their neutralization capabilities or other inhibitory activity against the particular antigen selected against. Neutralization assays and inhibitory assays for different antigens (e.g. virus, bacterial or fungal antigens) are known in the art. For example, exemplary virus neutralization assays to assess activity against a virus membrane-associated antigen include, but not limited to, virus attachment to cell membranes and penetration in cells, virus uncoating, virus nucleic acid synthesis, viral protein synthesis and maturation, assembly and release of infectious particles, targeting the membrane of infected cells resulting in a signal that leads to no replication or a lower replication rate of the virus. In another example, exemplary fungal neutralization assays to assess activity against a fungal antigen include measurement of the inhibition or amelioration of infection. Methods for measuring inhibition or amelioration of infection include, but are not limited to, metabolic activity assays, adhesion and invasion assays, biofilm formation assays, growth assays, hyphae formation assays, opsonization assays and gene transcription assays. Such assays can be employed to assess, for example, inhibition of yeast viability, adherence to and invasion of host cells, biofilm formation, growth and virulence, the promotion of phagocytosis by macrophage and the expression of cytokines such as IL-8. In an additional example, exemplary bacterial neutralization assays to assess activity against a bacterial antigen include, for example, bacterial attachment to cell membranes and penetration (e.g. phagocytosis) into cells and gene transcription assays. Exemplary assays to test selected antibodies against Candida are described herein below in Section G.

[0455] Functional Screening

[0456] Screening also can be performed to verify that the nucleic acid molecule(s) encodes a functional antibody. A desired variant nucleic acid molecule can be introduced into a functional screening vector using standard recombinant DNA techniques. Functional screening vectors generally contain the gene of interest, in this instance the antibody heavy chain or light chain, fused to gene encoding a protein that allows for detection of a function, such as, for example, a reporter protein, a binding protein or a protein that confers antibody resistance. In one example, the functional screening vector contains the gene encoding the Fab antibody fused to a gene encoding beta-lactamase (bla). In this example, expression of the bla fusion protein serves to protect the cells against the effects of carbenicillin, thereby causing a retention in viable cells when grown in the presence of carbenicillin. Thus, if the antibody heavy or light chain is expressed in frame, the fusion protein is produced and the cells survive. Out of frame expression or the presence of stop codons will result in the death of the cells.

### F. METHODS OF PRODUCTION OF ANTIBODIES

[0457] Domain-exchanged antibodies can be expressed in host cells and produced therefrom. The antibodies that provided herein and/or that are identified against selected antigens (e.g. Candida) in the selection and screening methods above can be made by recombinant DNA methods that are within the purview of those skilled in the art. DNA encoding the antibodies can be readily isolated and sequenced using conventional procedures (e.g., by using oligonucleotide probes that are capable of binding specifically to genes encoding the heavy and light chains of the domain-exchanged antibodies). For example, the cell source used in the particular selection or screening method employed to identify the antibody (e.g. the phage) can serve as a preferred source of such DNA. In another example, once the sequence of the DNA encoding the antibodies is determined, nucleic acid sequences can be constructed using gene synthesis techniques.

[0458] The DNA also can be modified. For example, gene synthesis or routine molecular biology techniques can be used to effect insertion, deletion, addition or replacement of nucleotides. For example, additional nucleotide sequences can be joined to a nucleic acid sequence, for example, by covalently joining to the immunoglobulin coding sequence all or part of the coding sequence for a non-immunoglobulin polypeptide. In one example linker sequences can be added, such as sequences containing restriction endonuclease sites for the purpose of cloning the synthetic gene into a vector, for example, a protein expression vector or a vector designed for the amplification of the antibody constant region coding DNA sequences. Furthermore, additional nucleotide sequences specifying functional DNA elements can be operatively linked to a recombined germline encoding nucleic acid molecule. Examples of such sequences include, but are not limited to, promoter sequences designed to facilitate intracellular protein expression, and leader peptide sequences designed to facilitate protein secretion. Additional nucleotide sequences such as sequences specifying protein binding regions also can be linked to nucleic acid sequences. Such regions include, but are not limited to, sequences to facilitate uptake of recombined antibodies or fragments thereof into specific target cells, or otherwise enhance the pharmacokinetics of the synthetic gene.

[0459] The domain-exchanged antibodies can be expressed as full-length domain-exchanged antibodies, or as antibodies that are less then full length, for example, as domain-exchanged antibody fragments, including, but not limited to Fabs, Fab hinge fragment, scFv fragment, scFv tandem fragment and scFv hinge and scFv hinge(ΔE) fragments. Thus, for example, it is understood that any of the antibodies provided herein can be produced in any form so long as the resulting antibodies are domain-exchanged antibodies, which have a particular structure containing an interface formed by two interlocking V_{H} domains (V_{H}-V_{H}′ interface) and exhibit binding to Candida. For example, domain-exchanged antibodies provided herein generally contain at least two V_{H} chains and two V_{L} chains, whereby the V_{H} domains interact producing a V_{H}-V_{H}′ interface characteristic of the domain-exchanged configuration. The antibodies can further be produced to contain a hinge region, constant region or linkers.

[0460] 2. Methods of Expression of Domain-Exchanged Antibodies

[0461] The nucleic acids encoding antibody polypeptides are typically cloned into a vector before transformation into prokaryotic or eukaryotic cells. Choice of vector can depend on the desired application. For example, after insertion of the nucleic acid, the vectors typically are used to transform host cells, for example, to amplify the recombined antibody genes for replication and/or expression thereof. In such examples, a vector suitable for high level expression is used.

[0462] In one example, nucleic acid encoding the heavy chain of a domain-exchanged antibody is ligated into a first expression vector and nucleic acid encoding the light chain of a domain-exchanged antibody is ligated into a second expression vector. The expression vectors can be the same or different, although generally they are sufficiently compatible to allow comparable expression of proteins (heavy and light chain) therefrom. For example, to generate a domain-exchanged Fab, sequences encoding the V_{H}-C_{H}1 can be cloned into a first expression vector and sequences encoding the V_{L}-C_{L} domains can be cloned into a second expression vector. An exemplary expression vector includes pTT5 (NRC Biotechnology Research) for expression in HEK293-6E cells. Other expression vectors and host cells are described below. The first and second expression vectors are co-transfected into host cells, typically at a 1:1 ratio. Upon expression of two copies of an antibody fragment chain (e.g., two copies of the V_{H}-C_{H}1 chain and V_{L}-C_{L}), two heavy chain variable regions (V_{H}) interlock and further pair with a light chain variable region (V_{L}) to generate domain-exchanged Fab dimers.

[0463] If desired, the vectors also can contain further sequences encoding additional constant region(s) or hinge regions to generate other antibody forms. For example, a full-length domain-exchanged antibody can be generated including in a first expression vector nucleotides encoding the heavy gene, sequences for the hinge and IgG constant regions; exemplary of such regions in 2G12 are amino acids 226-236 of SEQ ID NO:160 (hinge) and amino acids 237-454 of SEQ ID NO:160 (IgG1 Fc). Upon co-expression with the second expression vector encoding the V_{L}-C_{L} domains a full-length domain-exchanged antibody is expressed. Using these exemplified methods, it is within the level of one of skill in the art to generate other antibody forms, including other antibody fragment forms of domain-exchanged antibodies.

[0464] In another example, nucleic acid molecules encoding both the heavy and light chain of a domain-exchanged antibodies are expressed from the same vector. This is exemplified above with respect to display vectors (e.g. pCAL vectors). It is understood that any of the display vectors, for example, any pCAL vector, described above in Section E.b.1 can be used to produce soluble protein. For example, such vectors can be modified to not include the display protein (e.g. coat protein). Alternatively, vectors that do not contain a stop codon in the leader sequence but that do contain a stop codon between the nucleic acid encoding the antibody and the coat protein, can be introduced into a non-suppressor host cell strain. Upon expression, there is no readthrough of the stop codon, so that only soluble antibody chains are expressed without fusion to a coat protein.

[0465] Using either of the above methods, one of skill in the art can generate a full-length domain-exchanged antibody, or a domain-exchanged antibody fragment such as any described herein below.

[0466] a. Domain-Exchanged Fab Fragment

[0467] The domain-exchanged Fab fragment can be generated using a vector containing a nucleic acid encoding the V_{H}-C_{H}1 chain, followed by a nucleic acid encoding a stop codon (e.g. the amber stop codon (TAG)), and optionally followed by a nucleic acid encoding a coat protein. In one example, the vector also includes the nucleic acid encoding a light chain (V_{L}-C_{L}). Alternatively, the light chain can be expressed from another vector, which is used to transform the same host cell. The vectors for display of the domain-exchanged Fab antibody are designed such that, when expressed, for example in a non-suppressor cell, two copies of the soluble heavy chain assemble, along with two soluble light chains produced by the same vector or a different vector, to form the domain-exchanged “Fab” antibody having two conventional antibody combining sites. The Fab exists as a dimer.

[0468] b. Domain-Exchanged scFv Fragment

[0469] A domain-exchanged scFv fragment contains two chains, each of which contains one V_{H} and one V_{L} domain, joined by a peptide linker (V_{H}-linker-V_{L}). In the folded domain-exchanged scFv fragment, the two chains interact through the V_{H} domains, providing the interlocked domain-exchanged configuration. The domain-exchanged scFv fragment can be generated with a vector containing a nucleic acid encoding the V_{H}-linker-V_{L} single chain, followed by a sequence encoding a stop codon (e.g. the amber stop codon (TAG)), and optionally followed by a sequence encoding a coat protein. Such a vector is designed so that, when expressed, for example in a non-suppressor cell, a soluble single chain (V_{H}-linker-V_{L}) is produced. Upon interaction with other produced proteins a scFv fragment is produced having two chains and two conventional antibody combining sites.

[0470] c. Domain-Exchanged Fab Hinge Fragment

[0471] A domain-exchanged Fab hinge fragment is generated by inserting a nucleic acid encoding a hinge region into the domain-exchanged Fab fragment vector, between the nucleic acid encoding the C_{H}1 domain and, if included, the nucleic acid encoding the coat protein. Thus, the domain-exchanged Fab hinge fragment is identical to the domain-exchanged Fab fragment, except that each heavy chain further includes a hinge region in each heavy chain following the C_{H}1 region, which promotes interaction between the two heavy chains.

[0472] d. Domain-Exchanged scFv Tandem Fragment

[0473] In the nucleic acid molecule encoding a domain-exchanged scFv fragment, three nucleic acids encoding peptide linkers are inserted between the nucleic acids encoding a first V_{L} and first V_{H} chain, between the nucleic acids encoding the first V_{H} and a second V_{H} chain, and between nucleic acids encoding the second V_{H} and a second V_{L} chain. Thus, the scFv tandem vector carries two copies each of identical nucleic acid molecules encoding the light chain and heavy chain variable region domains, all four of which are joined by nucleic acids encoding peptide linkers. Thus, in the fragment, two heavy and two light chain variable region domains are joined by peptide linkers.

[0474] e. Domain-Exchanged Single Chain Fab Fragments

[0475] To generate a single chain Fab fragment, the domain-exchanged Fab fragment is modified by inserting sequences encoding peptide linkers between the V_{L}-C_{L} sequence and the V_{H}-C_{H}1, thereby generating upon expression, for example in a non-suppressor host cell, one soluble V_{L}-C_{L}-linker-V_{H}-C_{H}1 chain to form a single chain Fab (scFab) fragment, such as the scFab ΔC², having the domain-exchanged configuration. In the scFab ΔC² fragment, two cysteines are mutated to ablate formation of the disulfide bonds between the constant regions, as the presence of the linkers makes these disulfide bonds unnecessary for stabilizing the folded antibody fragment. A modified scFab ΔC² fragment, the scFab ΔC²Cys19 fragment, is described below.

[0476] f. Domain-Exchanged Fab Cys19

[0477] The domain-exchanged Fab Cys 19 fragment is identical to the domain-exchanged Fab fragment, but carries this Ile-Cys mutation; the domain-exchanged scFab ΔC²Cys19 is identical to the domain-exchanged scFab ΔC² fragment but further carries this mutation; and the scFv Cys19 is identical to the domain-exchanged scFv fragment, but carries this additional mutation. Nucleic acid sequences of exemplary vectors encoding domain-exchanged 2G12 Fab Cys19, scFab ΔC²Cys19, and scFv Cys19 fragments are set forth in SEQ ID NOS: 191, 192, and 193, respectively.

[0478] g. Domain-Exchanged scFv Hinge

[0479] A domain-exchanged scFv hinge fragment is generated by inserting into the vector encoding the domain-exchanged scFv fragment a nucleic acid encoding a hinge region between the nucleic acids encoding the V_{H} and, if included, the coat protein. Thus, the domain-exchanged scFv hinge fragment is identical to the domain-exchanged Fab fragment, with the exception that a hinge region is included in each chain, promoting formation of a disulfide bridge, which can stabilize the configuration of the domain-exchanged fragment.

[0480] 3. Vectors

[0481] Many expression vectors are available and known to those of skill in the art for the expression of antibodies or portions thereof. The choice of an expression vector is influenced by the choice of host expression system. Such selection is well within the level of skill of the skilled artisan. In general, expression vectors can include transcriptional promoters and optionally enhancers, translational signals, and transcriptional and translational termination signals. Expression vectors that are used for stable transformation typically have a selectable marker which allows selection and maintenance of the transformed cells. In some cases, an origin of replication can be used to amplify the copy number of the vectors in the cells. Vectors also generally can contain additional nucleotide sequences operably linked to the ligated nucleic acid molecule (e.g. His tag, Flag tag). For purposes herein, vectors generally include sequences encoding the constant region. Thus, antibodies or portions thereof also can be expressed as protein fusions. For example, a fusion can be generated to add additional functionality to a polypeptide. Examples of fusion proteins include, but are not limited to, fusions of a signal sequence, an epitope tag such as for localization, e.g. a his₆ tag or a myc tag, or a tag for purification, for example, a GST fusion, and a sequence for directing protein secretion and/or membrane association.

[0482] For example, expression of the proteins can be controlled by any promoter/enhancer known in the art. Suitable bacterial promoters are well known in the art and described herein below. Other suitable promoters for mammalian cells, yeast cells and insect cells are well known in the art and some are exemplified below. Selection of the promoter used to direct expression of a heterologous nucleic acid depends on the particular application. Promoters which can be used include but are not limited to eukaryotic expression vectors containing the SV40 early promoter (Bernoist and Chambon, (1981) Nature 290:304-310), the promoter contained in the 3′ long terminal repeat of Rous sarcoma virus (Yamamoto et al. (1980) Cell 22:787-797), the herpes thymidine kinase promoter (Wagner et al., (1981) Proc. Natl. Acad. Sci. USA 78:1441-1445), the regulatory sequences of the metallothionein gene (Brinster et al., (1982) Nature 296:39-42); prokaryotic expression vectors such as the β-lactamase promoter (Jay et al., (1981) Proc. Natl. Acad. Sci. USA 78:5543) or the tac promoter (DeBoer et al., (1983) Proc. Natl. Acad. Sci. USA 80:21-25); see also “Useful Proteins from Recombinant Bacteria”: in Scientific American 242:79-94 (1980)); plant expression vectors containing the nopaline synthetase promoter (Herrara-Estrella et al., (1984) Nature 303:209-213) or the cauliflower mosaic virus 35S RNA promoter (Gardner et al., (1981) Nucleic Acids Res. 9:2871), and the promoter of the photosynthetic enzyme ribulose bisphosphate carboxylase (Herrera-Estrella et al., (1984) Nature 310:115-120); promoter elements from yeast and other fungi such as the Gal4 promoter, the alcohol dehydrogenase promoter, the phosphoglycerol kinase promoter, the alkaline phosphatase promoter, and the following animal transcriptional control regions that exhibit tissue specificity and have been used in transgenic animals: elastase I gene control region which is active in pancreatic acinar cells (Swift et al., (1984) Cell 38:639-646; Ornitz et al., (1986) Cold Spring Harbor Symp. Quant. Biol. 50:399-409; MacDonald, (1987) Hepatology 7:425-515); insulin gene control region which is active in pancreatic beta cells (Hanahan et al., (1985) Nature 315:115-122), immunoglobulin gene control region which is active in lymphoid cells (Grosschedl et al., (1984) Cell 38:647-658; Adams et al., (1985) Nature 318:533-538; Alexander et al., (1987) Mol. Cell. Biol. 7:1436-1444), mouse mammary tumor virus control region which is active in testicular, breast, lymphoid and mast cells (Leder et al., (1986) Cell 45:485-495), albumin gene control region which is active in liver (Pinckert et al., (1987) Genes and Devel. 1:268-276), alpha-fetoprotein gene control region which is active in liver (Krumlauf et al., (1985) Mol. Cell. Biol. 5:1639-1648; Hammer et al., (1987) Science 235:53-58), alpha-1 antitrypsin gene control region which is active in liver (Kelsey et al., (1987) Genes and Devel. 1:161-171), beta globin gene control region which is active in myeloid cells (Magram et al., (1985) Nature 315:338-340; Kollias et al., (1986) Cell 46:89-94), myelin basic protein gene control region which is active in oligodendrocyte cells of the brain (Readhead et al., (1987) Cell 48:703-712), myosin light chain-2 gene control region which is active in skeletal muscle (Shani, (1985) Nature 314:283-286), and gonadotrophic releasing hormone gene control region which is active in gonadotrophs of the hypothalamus (Mason et al., (1986) Science 234:1372-1378).

[0483] In addition to the promoter, the expression vector typically contains a transcription unit or expression cassette that contains all the additional elements required for the expression of the antibody, or portion thereof, in host cells. A typical expression cassette contains a promoter operably linked to the nucleic acid sequence encoding the antibody chain and signals required for efficient polyadenylation of the transcript, ribosome binding sites and translation termination. Additional elements of the cassette can include enhancers. In addition, the cassette typically contains a transcription termination region downstream of the structural gene to provide for efficient termination. The termination region can be obtained from the same gene as the promoter sequence or may be obtained from different genes.

[0484] Some expression systems have markers that provide gene amplification such as thymidine kinase and dihydrofolate reductase. Alternatively, high yield expression systems not involving gene amplification are also suitable, such as using a baculovirus vector in insect cells, with a nucleic acid sequence encoding a germline antibody chain under the direction of the polyhedron promoter or other strong baculovirus promoter.

[0485] Vectors can be provided that contain a sequence of nucleotides that encodes a constant region of an antibody operably linked to the nucleic acid sequence encoding the variable region of the antibody. The vector can include the sequence for one or all of a C_{H}1, C_{H}2, hinge, C_{H}3 or C_{H}4 and/or C_{L}. Generally, such as for expression of Fabs, the vector contains the sequence for a C_{H}1 or C_{L} (kappa or lambda light chains). The sequences of constant regions or hinge regions are known to one of skill in the art (see e.g. U.S. Published Application No. 20080248028) and described herein.

[0486] Exemplary expression vectors include any mammalian expression vector such as, for example, pCMV. For bacterial expression, such vectors include pBR322, pUC, pSKF, pET23D, and fusion vectors such as MBP, GST and LacZ. Other eukaryotic vectors, for example any containing regulatory elements from eukaryotic viruses can be used as eukaryotic expression vectors. These include, for example, SV40 vectors, papilloma virus vectors, and vectors derived from Epstein-Bar virus. Other exemplary eukaryotic vectors include pMSG, pAV009/A+, pMT010/A+, pMAMneo-5, baculovirus pDSCE, and any other vector allowing expression of proteins under the direction of the CMV promoter, SV40 early promoter, SV40 late promoter, metallothionein promoter, murine mammary tumor virus promoter, Rous sarcoma virus promoter, polyhedron promoter, or other promoters shown effective for expression in eukaryotes.

[0487] Exemplary vectors for expression of domain-exchanged antibodies include the pCAL vectors described in Section E.b.1 above.

[0488] Any methods known to those of skill in the art for the insertion of DNA fragments into a vector can be used to construct expression vectors containing a nucleic acid encoding an antibody chain. These methods can include in vitro recombinant DNA and synthetic techniques and in vivo recombinants (genetic recombination). The insertion into a cloning vector can, for example, be accomplished by ligating the DNA fragment into a cloning vector which has complementary cohesive termini. If the complementary restriction sites used to fragment the DNA are not present in the cloning vector, the ends of the DNA molecules can be enzymatically modified. Alternatively, any site desired can be produced by ligating nucleotide sequences (linkers) onto the DNA termini; these ligated linkers can contain specific chemically synthesized nucleic acids encoding restriction endonuclease recognition sequences.

[0489] 4. Cells and Expression Systems

[0490] Cells containing the vectors also are provided. Generally, any cell type that can be engineered to express heterologous DNA and has a secretory pathway is suitable. Expression hosts include prokaryotic and eukaryotic organisms such as bacterial cells (e.g. E. coli), yeast cells, fungal cells, Archea, plant cells, insect cells and animal cells including human cells. Expression hosts can differ in their protein production levels as well as the types of post-translational modifications that are present on the expressed proteins. Further, the choice of expression host is often related to the choice of vector and transcription and translation elements used. For example, the choice of expression host is often, but not always, dependent on the choice of precursor sequence utilized. For example, many heterologous signal sequences can only be expressed in a host cell of the same species (i.e., an insect cell signal sequence is optimally expressed in an insect cell). In contrast, other signal sequences can be used in heterologous hosts such as, for example, the human serum albumin (hHSA) signal sequence which works well in yeast, insect, or mammalian host cells and the tissue plasminogen activator pre/pro sequence which has been demonstrated to be functional in insect and mammalian cells (Tan et al., (2002) Protein Eng. 15:337). The choice of expression host can be made based on these and other factors, such as regulatory and safety considerations, production costs and the need and methods for purification. Thus, the vector system must be compatible with the host cell used.

[0491] Expression in eukaryotic hosts can include expression in yeast such as Saccharomyces cerevisiae and Pichia pastoris, insect cells such as Drosophila cells and lepidopteran cells, plants and plant cells such as tobacco, corn, rice, algae, and Lemna. Eukaryotic cells for expression also include mammalian cells lines such as Chinese hamster ovary (CHO) cells or baby hamster kidney (BHK) cells. Eukaryotic expression hosts also include production in transgenic animals, for example, including production in serum, milk and eggs.

[0492] Expression vectors can be introduced into host cells via, for example, transformation, transfection, infection, electroporation and sonoporation, so that many copies of the gene sequence are generated. Generally, standard transfection methods are used to produce bacterial, mammalian, yeast, or insect cell lines that express large quantity of antibody chains, which is then purified using standard techniques (see e.g., Colley et al. (1989) J. Biol. Chem., 264:17619-17622; Guide to Protein Purification, in Methods in Enzymology, vol. 182 (Deutscher, ed.), 1990). Transformation of eukaryotic and prokaryotic cells are performed according to standard techniques (see, e.g., Morrison (1977) J. Bact. 132:349-351; Clark-Curtiss and Curtiss (1983) Methods in Enzymology, 101, 347-362). For example, any of the well-known procedures for introducing foreign nucleotide sequences into host cells can be used. These include the use of calcium phosphate transfection, polybrene, protoplast fusion, electroporation, biolistics, liposomes, microinjection, plasma vectors, viral vectors and any other the other well known methods for introducing cloned genomic DNA, cDNA, synthetic DNA or other foreign genetic material into a host cell. Generally, for purposes herein, host cells are transfected with a first vector encoding at least a V_{H} chain and a second vector encoding at least a V_{L} chain. Thus, it is only necessary that the particular genetic engineering procedure used be capable of successfully introducing at least both genes into the host cell capable of expressing antibody polypeptide.

[0493] Transformation of host cells with recombinant DNA molecules that incorporate the variable region gene, cDNA, or synthesized DNA sequence enables generation of multiple copies of the gene. Thus, the gene can be obtained in large quantities by growing transformants, isolating the recombinant DNA molecules from the transformants and, when necessary, retrieving the inserted gene from the isolated recombinant DNA. Generally, after the expression vector is introduced into the cells, the transfected cells are cultured under conditions favoring expression of the germline chain, which is recovered from the culture using standard purification techniques identified below.

[0494] Antibodies and portions thereof can be produced using a high throughput approach by any methods known in the art for protein production including in vitro and in vivo methods such as, for example, the introduction of nucleic acid molecules encoding antibodies or portions thereof into a host cell or host animal and expression from nucleic acid molecules encoding recombined antibodies in vitro. Prokaryotes, especially E. coli, provide a system for producing large amounts of antibodies or portions thereof, and are particularly desired in applications of high-throughput expression and purification of proteins. Transformation of E. coli is a simple and rapid technique well known to those of skill in the art. E. coli host strains for high throughput expression include, but are not limited to, BL21 (EMD Biosciences) and LMG194 (ATCC). Exemplary of such an E. coli host strain is BL21. Vectors for high throughput expression include, but are not limited to, pBR322 and pUC vectors. Automation of expression and purification can facilitate high-throughput expression

[0495] a. Prokaryotic Expression

[0496] Prokaryotes, especially E. coli, provide a system for producing large amounts of antibodies or portions thereof. Transformation of E. coli is a simple and rapid technique well known to those of skill in the art. Expression vectors for E. coli can contain inducible promoters that are useful for inducing high levels of protein expression and for expressing proteins that exhibit some toxicity to the host cells. Examples of inducible promoters include the lac promoter, the trp promoter, the hybrid tac promoter, the T7 and SP6 RNA promoters and the temperature regulated λP_{L} promoter.

[0497] Antibodies or portions thereof can be expressed in the cytoplasmic environment of E. coli. The cytoplasm is a reducing environment and for some molecules, this can result in the formation of insoluble inclusion bodies. Reducing agents such as dithiothreitol and β-mercaptoethanol and denaturants (e.g., such as guanidine-HCl and urea) can be used to resolubilize the proteins. An exemplary alternative approach is the expression of recombined antibodies or fragments thereof in the periplasmic space of bacteria which provides an oxidizing environment and chaperonin-like and disulfide isomerases leading to the production of soluble protein. Typically, a leader sequence is fused to the protein to be expressed which directs the protein to the periplasm. The leader is then removed by signal peptidases inside the periplasm. There are three major pathways to translocate expressed proteins into the periplasm, namely the Sec pathway, the SRP pathway and the TAT pathway. Examples of periplasmic-targeting leader sequences include the pelB leader from the pectate lyase gene, the StII leader sequence, and the DsbA leader sequence. In some cases, periplasmic expression allows leakage of the expressed protein into the culture medium. The secretion of proteins allows quick and simple purification from the culture supernatant. Proteins that are not secreted can be obtained from the periplasm by osmotic lysis. Similar to cytoplasmic expression, in some cases proteins can become insoluble and denaturants and reducing agents can be used to facilitate solubilization and refolding. Temperature of induction and growth also can influence expression levels and solubility. Typically, temperatures between 25° C. and 37° C. are used. Mutations also can be used to increase solubility of expressed proteins. Typically, bacteria produce aglycosylated proteins. Thus, if proteins require glycosylation for function, glycosylation can be added in vitro after purification from host cells.

[0498] b. Yeast

[0499] Yeasts such as Saccharomyces cerevisiae, Schizosaccharomyces pombe, Yarrowia lipolytica, Kluyveromyces lactis, and Pichia pastoris are useful expression hosts for antibodies or portions thereof. Yeast can be transformed with episomal replicating vectors or by stable chromosomal integration by homologous recombination. Typically, inducible promoters are used to regulate gene expression. Examples of such promoters include AOX1, GAL1, GAL7, and GAL5 and metallothionein promoters such as CUP1. Expression vectors often include a selectable marker such as LEU2, TRP1, HIS3, and URA3 for selection and maintenance of the transformed DNA. Proteins expressed in yeast are often soluble. Co-expression with chaperonins such as Bip and protein disulfide isomerase can improve expression levels and solubility. Additionally, proteins expressed in yeast can be directed for secretion using secretion signal peptide fusions such as the yeast mating type alpha-factor secretion signal from Saccharomyces cerevisiae and fusions with yeast cell surface proteins such as the Aga2p mating adhesion receptor or the Arxula adeninivorans glucoamylase. A protease cleavage site such as for the Kex-2 protease, can be engineered to remove the fused sequences from the expressed polypeptides as they exit the secretion pathway. Yeast also is capable of glycosylation at Asn-X-Ser/Thr motifs.

[0500] c. Insects

[0501] Insect cells, particularly using baculovirus expression, are useful for expressing antibodies or portions thereof. Insect cells express high levels of protein and are capable of most of the post-translational modifications used by higher eukaryotes. Baculovirus have a restrictive host range which improves the safety and reduces regulatory concerns of eukaryotic expression. Typical expression vectors use a promoter for high level expression such as the polyhedrin promoter and p10 promoter of baculovirus. Commonly used baculovirus systems include the baculoviruses such as Autographa californica nuclear polyhedrosis virus (AcNPV), and the Bombyx mori nuclear polyhedrosis virus (BmNPV) and an insect cell line such as Sf9 derived from Spodoptera frugtiperda and TN derived from Trichoplusia ni. For high-level expression, the nucleotide sequence of the molecule to be expressed is fused immediately downstream of the polyhedrin initiation codon of the virus. To generate baculovirus recombinants capable of expressing human antibodies, a dual-expression transfer, such as pAcUW51 (PharMingen) is utilized. Mammalian secretion signals are accurately processed in insect cells and can be used to secrete the expressed protein into the culture medium

[0502] An alternative expression system in insect cells is the use of stably transformed cells. Cell lines such as Sf9 derived cells from Spodoptera frugiperda and TN derived cells from Trichoplusia ni can be used for expression. The baculovirus immediate early gene promoter IE1 can be used to induce consistent levels of expression. Typical expression vectors include the pIE1-3 and pI31-4 transfer vectors (Novagen). Expression vectors are typically maintained by the use of selectable markers such as neomycin and hygromycin.

[0503] d. Mammalian Cells

[0504] Mammalian expression systems can be used to express antibodies or portions thereof. Expression constructs can be transferred to mammalian cells by viral infection such as adenovirus or by direct DNA transfer such as liposomes, calcium phosphate, DEAE-dextran and by physical means such as electroporation and microinjection. Expression vectors for mammalian cells typically include an mRNA cap site, a TATA box, a translational initiation sequence (Kozak consensus sequence) and polyadenylation elements. Such vectors often include transcriptional promoter-enhancers for high-level expression, for example the SV40 promoter-enhancer, the human cytomegalovirus (CMV) promoter and the long terminal repeat of Rous sarcoma virus. These promoter-enhancers are active in many cell types. Tissue and cell-type promoters and enhancer regions also can be used for expression. Exemplary promoter/enhancer regions include, but are not limited to, those from genes such as elastase I, insulin, immunoglobulin, mouse mammary tumor virus, albumin, alpha fetoprotein, alpha 1 antitrypsin, beta globin, myelin basic protein, myosin light chain 2, and gonadotropic releasing hormone gene control. Selectable markers can be used to select for and maintain cells with the expression construct. Examples of selectable marker genes include, but are not limited to, hygromycin B phosphotransferase, adenosine deaminase, xanthine-guanine phosphoribosyl transferase, aminoglycoside phosphotransferase, dihydrofolate reductase and thymidine kinase. Antibodies are typically produced using a NEO^{R}/G418 system, a dihydrofolate reductase (DHFR) system or a glutamine synthetase (GS) system. The GS system uses joint expression vectors, such as pEE12/pEE6, to express both heavy chain and light chain. Fusion with cell surface signaling molecules such as TCR-ζ and Fc_{ε}RI-γ can direct expression of the proteins in an active state on the cell surface.

[0505] Many cell lines are available for mammalian expression including mouse, rat human, monkey, chicken and hamster cells. Exemplary cell lines include but are not limited to CHO, Balb/3T3, HeLa, MT2, mouse NS0 (nonsecreting) and other myeloma cell lines, hybridoma and heterohybridoma cell lines, lymphocytes, fibroblasts, Sp2/0, COS, NIH3T3, HEK293, 293S, 2B8, and HKB cells. Cell lines also are available adapted to serum-free media which facilitates purification of secreted proteins from the cell culture media. One such example is the serum free EBNA-1 cell line (Pham et al., (2003) Biotechnol. Bioeng. 84:332-42.)

[0506] e. Plants

[0507] Transgenic plant cells and plants can be used to express proteins such as any antibody or portion thereof described herein. Expression constructs are typically transferred to plants using direct DNA transfer such as microprojectile bombardment and PEG-mediated transfer into protoplasts, and with agrobacterium-mediated transformation. Expression vectors can include promoter and enhancer sequences, transcriptional termination elements and translational control elements. Expression vectors and transformation techniques are usually divided between dicot hosts, such as Arabidopsis and tobacco, and monocot hosts, such as corn and rice. Examples of plant promoters used for expression include the cauliflower mosaic virus CaMV 35S promoter, the nopaline synthase promoter, the ribose bisphosphate carboxylase promoter and the maize ubiquitin-1 (ubi-1) promoter promoters. Selectable markers such as hygromycin, phosphomannose isomerase and neomycin phosphotransferase are often used to facilitate selection and maintenance of transformed cells. Transformed plant cells can be maintained in culture as cells, aggregates (callus tissue) or regenerated into whole plants. Transgenic plant cells also can include algae engineered to produce proteases or modified proteases (see for example, Mayfield et al. (2003) PNAS 100:438-442). Because plants have different glycosylation patterns than mammalian cells, this can influence the choice of protein produced in these hosts.

[0508] 5. Purification

[0509] Antibodies and portions thereof are purified by any procedure known to one of skill in the art. The domain-exchanged antibodies can be purified to substantial purity using standard protein purification techniques known in the art including but not limited to, SDS-PAGE, size fraction and size exclusion chromatography, ethanol precipitation, reverse phase HPLC, ammonium sulfate precipitation, chelate chromatography, ionic exchange chromatography or column chromatography. For example, antibodies can be purified by column chromatography. Exemplary of a method to purify antibodies is by using column chromatography, wherein a solid support column material is linked to Protein G, a cell surface-associated protein from Streptococcus, that binds immunoglobulins with high affinity. Protein A also can be used to purified antibodies. The antibodies can be purified to 60%, 70%, 80% purity and typically at least 90%, 91%, 92%, 93%, 94%, 95%, 96%, 97%, 98% or 99% purity. Purity can be assessed by standard methods such as by SDS-PAGE and Coomassie staining.

[0510] In one aspect, Protein A immobilized on a solid phase is used for immunoaffinity purification of full-length domain-exchanged antibodies. Protein A is a 41 kD cell wall protein from Staphylococcus aureus, which binds with a high affinity to the Fc region of antibodies (Lindmarke et al. (1983) J. Immunol. Method., 62:1-13). The solid phase to which Protein A is immobilized is generally a column containing a glass or silica surface, generally a controlled pore glass column or a silica acid column. In some applications, the column has been coated with a reagent, such as glycerol, in an attempt to prevent nonspecific adherence of contaminants. The antibody can be recovered from the solid phase by elution.

[0511] Since domain-exchanged antibodies exist as dimers, and sometimes as larger ordered oligomers, purification schemes can be effected to select particular structures. For example, purification schemes can involve two size exclusion chromatography steps. In an exemplary example, the first step can include running a first concentrated protein A eluate over a Superdex 200 16/60 column, and then the monomer and dimer fractions can be separately placed over a Superdex 200 10/30 column (see e.g. West et al. (2009) J. Virol., 83:98-104).

[0512] Methods for purification of domain-exchanged antibodies from host cells depend on the chosen host cells and expression systems. For secreted molecules, proteins are generally purified from the culture media after removing the cells. For intracellular expression, cells can be lysed and the proteins purified from the extract. When transgenic organisms such as transgenic plants and animals are used for expression, tissues or organs can be used as starting material to make a lysed cell extract. Additionally, transgenic animal production can include the production of polypeptides in milk or eggs, which can be collected, and if necessary further the proteins can be extracted and further purified using standard methods in the art.

[0513] When antibodies are expressed by transformed bacteria in large amounts, typically after promoter induction, although expression can be constitutive, the polypeptides can form insoluble aggregates. There are several protocols that are suitable for purification of polypeptide inclusion bodies known to one of skill in the art. Numerous variations will be apparent to those of skill in the art.

[0514] For example, in one method, the cell suspension is generally centrifuged and the pellet containing the inclusion bodies resuspended in buffer which does not dissolve but washes the inclusion bodies, e.g., 20 mM Tris-HCL (pH 7.2), 1 mM EDTA, 150 mM NaCl and 2% Triton-X 100, a non-ionic detergent. It may be necessary to repeat the wash step to remove as much cellular debris as possible. The remaining pellet of inclusion bodies can be resuspended in an appropriate buffer (e.g., 20 mM sodium phosphate, pH 6.8, 150 mM NaCl). Other appropriate buffers are apparent to those of skill in the art.

[0515] Alternatively, antibodies can be purified from bacteria periplasm. Where the polypeptide is exported into the periplasm of the bacteria, the periplasmic fraction of the bacteria can be isolated by cold osmotic shock in addition to other methods known to those of skill in the art. For example, in one method, to isolate recombinant polypeptides from the periplasm, the bacterial cells are centrifuged to form a pellet. The pellet is resuspended in a buffer containing 20% sucrose. To lyse the cells, the bacteria are centrifuged and the pellet is resuspended in ice-cold 5 mM MgSO₄ and kept in an ice bath for approximately 10 minutes. The cell suspension is centrifuged and the supernatant decanted and saved. The recombinant polypeptides present in the supernatant can be separated from the host proteins by standard separation techniques well known to those of skill in the art. These methods include, but are not limited to, the following steps: solubility fractionation, size differential filtration, and column chromatography.

### F. ASSESSING ANTI-CANDIDA ANTIBODY PROPERTIES AND ACTIVITIES

[0516] The anti-Candida antibodies provided herein can be characterized in a variety of ways well-known to one of skill in the art. For example, the anti-Candida antibodies provided herein can be assayed for the ability to immunospecifically bind to Candida, such as for example binding to a surface antigen of Candida. Such assays can be performed, for example, in solution (e.g., Houghten (1992) Bio/Techniques 13:412-421), on beads (Lam (1991) Nature 354:82-84), on chips (Fodor (1993) Nature 364:555-556), on bacteria (U.S. Pat. No. 5,223,409), on spores (U.S. Pat. Nos. 5,571,698; 5,403,484; and 5,223,409), on plasmids (Cull et al. (1992) Proc. Natl. Acad. Sci. USA 89:1865-1869) or on phage (Scott and Smith (1990) Science 249:386-390; Devlin (1990) Science 249:404-406; Cwirla et al. (1990) Proc. Natl. Acad. Sci. USA 87:6378-6382; and Felici (1991) J. Mol. Biol. 222:301-310). Antibodies that have been identified to immunospecifically bind to a Candida antigen also can be assayed for their specificity and affinity for a Candida antigen. In addition, in vitro assays and in vivo animal models using the anti-Candida antibodies provided herein can be employed for measuring the level of Candida inhibition effected by contact or administration of the anti-Candida antibodies.

[0517] 1. Binding Assays

[0518] The anti-Candida antibodies provided herein can be assessed for their ability to bind a selected target (e.g., whole Candida yeast or an isolated Candida-expressed protein) and the specificity for such targets by any method known to one of skill in the art. Exemplary assays are described herein below. Binding assays can be performed in solution, suspension or on a solid support. For example, whole yeast cells can be incubated first with the anti-Candida antibodies followed by a second incubation with a secondary antibody that recognizes the primary antibody and is conjugated with a label such as FITC. After labeling, the yeast cells can be counted with a flow cytometer to analyze the antibody binding (see, U.S. Pat. Appl. No. 2004/0142385). In another example, target antigens can be immobilized to a solid support (e.g. a carbon or plastic surface, a tissue culture dish or chip) and contacted with antibody. Unbound antibody or target protein can be washed away and bound complexes can then be detected. Binding assays can be performed under conditions to reduce nonspecific binding, such as by using a high ionic strength buffer (e.g. 0.3-0.4 M NaCl) with nonionic detergent (e.g. 0.1% Triton X-100 or Tween 20) and/or blocking proteins (e.g. bovine serum albumin or gelatin). Negative controls also can be included in such assays as a measure of background binding. Binding affinities can be determined using Scatchard analysis (Munson et al., (1980) Anal. Biochem., 107:220), surface plasmon resonance, isothermal calorimetry, or other methods known to one of skill in the art.

[0519] Exemplary immunoassays which can be used to analyze immunospecific binding and cross-reactivity include, but are not limited to, competitive and non-competitive assay systems using techniques such as, but not limited to, western blots, radioimmunoassays, ELISA (enzyme linked immunosorbent assay), Meso Scale Discovery (MSD, Gaithersburg, Md.), “sandwich” immunoassays, immunoprecipitation assays, ELISPOT, precipitin reactions, gel diffusion precipitin reactions, immunodiffusion assays, agglutination assays, complement-fixation assays, immunoradiometric assays, fluorescent immunoassays, protein A immunoassays, immunohistochemistry, or immuno-electron microscopy. Such assays are routine and well known in the art (see, e.g., Ausubel et al., Eds, 1994, Current Protocols in Molecular Biology, Vol. 1, John Wiley & Sons, Inc., New York, which is incorporated by reference herein in its entirety). Other assay formats include liposome immunoassays (LIA), which use liposomes designed to bind specific molecules (e.g., antibodies) and release encapsulated reagents or markers. The released chemicals are then detected according to standard techniques (see Monroe et al., (1986) Amer. Clin. Prod. Rev. 5:34-41). Exemplary immunoassays not intended by way of limitation are described briefly below.

[0520] Immunoprecipitation protocols generally comprise lysing a population of cells in a lysis buffer such as RIPA buffer (1% NP-40 or Triton X-100, 1% sodium deoxycholate, 0.1% SDS, 0.15 M NaCl, 0.01 M sodium phosphate at pH 7.2, 1% Trasylol) supplemented with protein phosphatase and/or protease inhibitors (e.g., EDTA, PMSF, aprotinin, sodium vanadate), adding the antibody or antigen-binding fragment thereof of interest to the cell lysate, incubating for a period of time (e.g., 1 to 4 hours) at 40° C., adding protein A and/or protein G sepharose beads to the cell lysate, incubating for about an hour or more at 40° C., washing the beads in lysis buffer and resuspending the beads in SDS/sample buffer. The ability of the antibody of interest to immunoprecipitate a particular antigen can be assessed by, e.g., western blot analysis. One of skill in the art is knowledgeable as to the parameters that can be modified to increase the binding of the antibody to an antigen and decrease the background (e.g., pre-clearing the cell lysate with sepharose beads). For further discussion regarding immunoprecipitation protocols see, e.g., Ausubel et al., Eds, 1994, Current Protocols in Molecular Biology, Vol. 1, John Wiley & Sons, Inc., New York at 10.16.1.

[0521] Western blot analysis generally includes preparing yeast extract samples or yeast cell wall extracts, electrophoresis of the samples in a polyacrylamide gel (e.g., 8%-20% SDS-PAGE depending on the molecular weight of the antigen) or via 2-D gel electrophoresis (see, e.g., WO 04/043276), transferring the sample from the polyacrylamide gel to a membrane such as nitrocellulose, PVDF or nylon, blocking the membrane in blocking solution (e.g., PBS with 3% BSA or non-fat milk), washing the membrane in washing buffer (e.g., PBS-Tween 20), probing the membrane with primary antibody (i.e. the antibody of interest) diluted in blocking buffer, washing the membrane in washing buffer, probing the membrane with a secondary antibody (which recognizes the primary antibody, e.g., an anti-human antibody) conjugated to an enzymatic substrate (e.g., horseradish peroxidase or alkaline phosphatase) or radioactive molecule (e.g., ³²P or ¹²⁵I) diluted in blocking buffer, washing the membrane in wash buffer, and detecting the presence of the antigen. One of skill in the art is knowledgeable as to the parameters that can be modified to increase the signal detected and to reduce the background noise. For further discussion regarding western blot protocols see, e.g., Ausubel et al., Eds, 1994, Current Protocols in Molecular Biology, Vol. 1, John Wiley & Sons, Inc., New York at 10.8.1.

[0522] ELISAs include preparing antigen, coating the well of a 96-well microtiter plate with the antigen, adding the antibody of interest conjugated to a detectable compound such as an enzymatic substrate (e.g., horseradish peroxidase or alkaline phosphatase) to the well and incubating for a period of time, and detecting the presence of the antigen. In ELISAs, the antibody of interest does not have to be conjugated to a detectable compound; instead, a second antibody (which recognizes the antibody of interest) conjugated to a detectable compound can be added to the well. Further, instead of coating the well with the antigen, the antibody can be coated to the well. In this case, a second antibody conjugated to a detectable compound can be added following the addition of the antigen of interest to the coated well. One of skill in the art is knowledgeable as to the parameters that can be modified to increase the signal detected as well as other variations of ELISAs known in the art. For further discussion regarding ELISAs see, e.g., Ausubel et al., Eds, 1994, Current Protocols in Molecular Biology, Vol. 1, John Wiley & Sons, Inc., New York at 11.2.1.

[0523] Immunohistochemistry comprises preparing a tissue sample (e.g. from a Candida infected animal), fixing the tissue to preserve protein molecules in their native conformation, bathing the sample in a permeabilization reagent (e.g. Tween, Nonidet P40) to penetrate the tissue, blocking the sample with blocking solution (e.g., PBS with 3% BSA or non-fat milk), washing the sample in washing buffer (e.g., PBS-Tween 20), probing the sample with primary antibody (i.e. the antibody of interest) diluted in blocking buffer, washing the sample in washing buffer, probing the sample with a secondary antibody (which recognizes the primary antibody, e.g., an anti-human antibody) conjugated to a fluorescent dye (e.g. fluorescein isothiocyanate, Alexa fluor, rhodamine) diluted in blocking buffer, washing the sample in wash buffer, and detecting the presence of the antigen via fluorescent microscopy. One of skill in the art is knowledgeable as to the parameters that can be modified to increase the signal detected and to reduce the background noise.

[0524] The binding affinity of an antibody to an antigen and the off-rate of an antibody-antigen interaction can be determined, for example, by competitive binding assays. One example of a competitive binding assay is a radioimmunoassay involving the incubation of labeled antigen (e.g., ³H or ¹²⁵I) with the antibody of interest in the presence of increasing amounts of unlabeled antigen, and the detection of the antibody bound to the labeled antigen. The affinity of an anti-Candida antibody provided herein for a Candida antigen and the binding off-rates can be determined from the data by Scatchard plot analysis. Competition with a second antibody can also be determined using radioimmunoassays. In this case, a Candida antigen is incubated with an anti-Candida antibody provided herein conjugated to a labeled compound (e.g., ³H or ¹²⁵I) in the presence of increasing amounts of an unlabeled second antibody. In some examples, surface plasmon resonance (e.g., BiaCore 2000, Biacore AB, Upsala, Sweden and GE Healthcare Life Sciences; Malmqvist et al. (1993) Curr Opin Immunol. 5(2):282-6; Garcia-Ojeda et al. (2004) Infect Immun. 72(6):3451-60) kinetic analysis can be used to determine the binding on and off rates of antibodies to a Candida antigen. Surface plasmon resonance kinetic analysis comprises analyzing the binding and dissociation of a Candida antigen from chips with immobilized antibodies on their surface.

[0525] 2. In Vitro Assays for Analyzing Candida Inhibitory Effects of Antibodies

[0526] The anti-Candida antibodies provided herein can be analyzed by any suitable method known in the art for measurement of the inhibition or amelioration of Candida infection. Methods for measuring inhibition or amelioration of infection include, but are not limited to, metabolic activity assays, adhesion and invasion assays, biofilm formation assays, growth assays, hyphae formation assays, opsonization assays and gene transcription assays. Such assays can be employed to assess, for example, inhibition of yeast viability, adherence to and invasion of host cells, biofilm formation, growth and virulence, the promotion of phagocytosis by macrophage and the expression of cytokines such as IL-8 (see, e.g. Hasan et al. (2009) Microbes Infect. 11(8-9):753-61; Arseculeratne et al. (2007) Indian J Med Microbiol. 25(3):267-71; Calderone et al. (2009) Methods Mol. Biol. 499:85-93; Sohn et al. (2009) Methods Mol. Biol. 470:95-104; Hernandez et al. (2009) Methods Mol Biol. 470:105-23; Jayatilake et al. (2008) Mycopathologia 165(6):373-80; Torosantucci et al. (2009) PLoS One. 4(4):e5392; Dorocka-Bobkowska et al. (2009) Med Sci Monit. 15(9):BR262-9; Hollmer et al. (2006) Infect Dis Obstet Gynecol. 2006:98218; Maki et al. (2007) Microbiol Immunol. 51(11):1053-9; Mathews et al. (1998) J Med Microbiol. 47(11):1007-14; González-Novo et al. (2008) Mol Biol Cell. 19(4):1509-18; Calderone (2009) Methods Mol Biol. 499:85-93; WO 99/52922; WO 06/097689). One of skill in the art can identify any assay capable of measuring inhibition or amelioration of Candida infection.

[0527] Metabolic assays can be used to measure the ability of the anti-Candida antibodies to reduce the number of viable cells present in a culture or sample. Metabolic assays include, for example, XTT reduction assays and MTT reduction assays. Reduction of XTT or MTT only occurs when reductase enzymes are active, therefore these assays measure the viability of Candida by measuring the extent of their metabolic activity. In exemplary XTT or MTT reduction assays, MTT (3-(4,5-Dimethylthiazol-2-yl)-2,5-diphenyltetrazolium bromide, a tetrazole) or XTT (2,3-bis (2-methoxy-4-nitro-5-sulfophenyl)-5-[(phenylamino) carbonyl]-2H-tetrazolium hydroxide) are reduced to form a colored formazan in living cells. The formazan derivative of MTT is insoluble while the formazan derivative of XTT is soluble; thus, XTT reduction can be measured in Candida supernatants. One of skill in the art can determine which reduction assay is best based on the Candida sample to be measured. In both assays, the colored formazan can be easily quantified colorimetrically allowing the colored derivative to be predictive of the extent of metabolic activity and thus yeast viability. A decrease in the formation of the derivative indicates the ability of the antibody to reduce the number of live cells present in the culture or sample.

[0528] Adhesion assays can be used to measure the ability of the anti-Candida antibodies to inhibit the adhesion of Candida to host epithelial or endothelial cells. These assays can utilize a variety of cell line monolayers that include, but are not limited to, Hep-2, HeLa, and HS3 cells. One of skill in the art can identify appropriate cell lines for use in this assay. In exemplary adhesion assays, Candida cultures are pre-incubated with or without anti-Candida antibodies. Epithelial cell monolayers are then incubated with the Candida for a predetermined period of time after which, non-adherent fungal cells are washed away with PBS. Adherent fungal cells can then be removed with PBS+Triton and counted using standard CFU (colony forming units) assays that are known in the art. Alternatively, the Candida can be pre-labeled with fluorescein isothiocyanate or another compound (e.g. rhodamine, phycoerythrin, phycocyanin, allophycocyanin, o-phthaladehyde and fluorescamine) or a radioactive label (e.g., ³²P, ³⁵S, and ¹²⁵I) and adherent fungal cells counted via the detectable compound (e.g. flow cytometry, scintillation). Using still another alternative, monolayers with bound fungal cells can be air dried, gram stained and mounted on a glass slide. The number of attached fungal cells can be counted visually using a light microscope to count the yeast on fifty fields to extrapolate the total number of bound yeast cells. A reduction in the number of adherent fungal cells in samples pretreated with anti-Candida antibodies indicates that the antibodies are capable of preventing adhesion of Candida to host cells.

[0529] Other adhesion assays can be used to measure the ability of the anti-Candida antibodies to inhibit the adhesion of Candida to host epithelial or endothelial cells. These assays can utilize a variety of primary human cell samples that include, but are not limited to, human buccal epithelial cells (BEC) and human umbilical vein endothelial cells (HUVEC). Candida cells can be radiolabeled with ³⁵S-methionine and mixed in solution with BECs. After an incubation period, the BECs can be filtered through polycarbonate filters and the radioactivity quantitated in a scintillation counter. A decrease in radioactivity on the filter indicates a decrease in Candida binding to the BECs. Adhesion assays can also be performed by measuring the adherence of Candida to polystyrene plastic plates. Candida cells can be incubated with anti-Candida antibodies then poured into 6-well polystyrene plates. After washing to remove the non-adherent cells, Sabourad dextrose agar is poured into the wells and allowed to solidify. Colonies that appear after 24 hr of incubation at 37° C. are counted. A decrease in the number of colonies indicates the ability of the anti-Candida antibodies to inhibit adherence to plastic.

[0530] Tissue invasion assays can be used to measure the ability of the anti-Candida antibodies to inhibit the tissue invasion abilities of Candida. Exemplary tissue invasion assays can use a variety of tissues and cell lines that include, but are not limited to, tissues derived from human carcinomas, rabbit tongue mucosal explants, and reconstituted human oral epithelium. Alternatively, epithelial cells grown on a collagen gel to build models of intestinal (Caco-2 cells), vaginal (A431 cells) and oral (TR146 cells) mucosa tissues can be used as invasion matrices. Candida cultures can be pre-incubated with the anti-Candida antibodies and then introduced to the tissue models. These assays utilize light or scanning electron microscopy with immunohistological processing to observe the invasiveness of Candida into tissue models. A reduction in tissue invasiveness of Candida pre-treated with anti-Candida antibodies indicates that the anti-Candida antibodies have the ability to reduce the invasiveness of the fungal cells.

[0531] Biofilms are structures of microbial communities that are attached to a surface and encased in a matrix of extracellular polymeric substances. The formation of biofilms has been associated with the virulence of Candida. Thus, biofilm formation assays can be used to measure the ability of the anti-Candida antibodies to inhibit the formation of the pathogenically important biofilms. In exemplary biofilm formation assays, the Candida can be pre-treated with anti-Candida antibodies followed by the incubation of the Candida fungal cells with a suitable adherent material to allow biofilm formation. One of skill in the art can determine the optimal material and conditions for biofilm formation based on known examples in the art. The intensity of the staining of the biofilm with Crystal Violet provides a visible measurement of the ability of the anti-Candida antibodies to block biofilm formation. Alternatively, the XTT reduction assay (see above) can also measure the viability of the resultant biofilm as an indicator of the ability of the anti-Candida antibodies to block biofilm formation.

[0532] Growth assays can be used to measure the ability of the anti-Candida antibodies to inhibit growth of Candida in vitro. In exemplary growth assays, Candida cells can be collected from an overnight culture and added to a single well of a 96-well dish. Hyphal forms of Candida can be obtained by modifying growth conditions in ways known in the art. Anti-Candida antibodies are then incubated with Candida during their growth over a predetermined period of time. Tritiated uridine is then added to the growth culture and the amount of uridine incorporated into the Candida RNA can be counted via scintillation. A reduction in the amount of uridine incorporated into the Candida RNA indicates the ability of the anti-Candida antibodies to inhibit the growth of Candida. Alternatively, Candida can be incubated with anti-Candida antibodies and allowed to grow over a predetermined period of time after which their growth is measured by a classical plate dilution CFU (colony forming units) assay which counts the number of colonies that are capable of growing on Sabouraud agar plates per unit volume of inoculum. A variety of CFU assays are known in the art and can be used to measure the number of yeast cells in a sample after a given growth period.

[0533] Hyphae formation is a property associated with Candida virulence; thus, hyphae formation assays can be used to assess the virulence of Candida. To measure the ability of anti-Candida antibodies to inhibit the virulence of Candida via the inhibition of hyphae formation, hyphae formation assays can be used. In exemplary hyphae formation assays, Candida are allowed to grow overnight in liquid non-filament-inducing YEPD (yeast extract peptone-dextrose) media at 30° C. Candida are then incubated for a predetermined period of time with anti-Candida antibodies and then plated on a solid filament-inducing media. Filament-inducing medias can include, but are not limited to, Spider media, Lee's pH 6.8 media and YEPD+Serum (grown at 37° C.). The inhibition or reduction of hyphae as observed under microscope with magnification indicates the ability of the antibodies to inhibit hyphae formation and thus reduce virulence. Candida can alternatively be grown in liquid filament-inducing media and temperatures, fixed in 4.5% formaldehyde then visualized by Nomarski/DIC optics. The anti-Candida antibodies can also be assayed for their ability to inhibit or downregulate the expression of certain Candida polypeptides known to be involved in virulence and filament formation. Techniques known to those of skill in the art, including, but not limited to, Western blot analysis, Northern blot analysis and RT-PCR can be used to measure the expression of particular polypeptides.

[0534] Opsonization assays can be used to measure the ability of the anti-Candida antibodies to opsonize fungal cells thus leading to their phagocytosis by macrophage. In exemplary opsonization assays, the Candida are FITC-labeled and incubated for a predetermined period of time with the anti-Candida antibodies. After incubation, Candida are exposed to a macrophage cell line such as, but not limited to, J774 cells. Macrophage are allowed to contact the fungal cells to induce phagocytosis. After a predetermined period of time, the macrophage can be lysed and live Candida cells counted via methods known to those of skill in the art. A reduction in the number of live Candida cells indicates that the antibody is capable of opsonizing Candida cell leading to their phagocytosis by the macrophage. Alternatively, macrophage can be imaged via confocal microscopy and the number of Candida cells internalized by the macrophage can be counted.

[0535] Gene transcription assays can be used to measure the ability of the anti-Candida antibodies to inhibit the expression of genes involved in host tissue responses to Candida infection. In exemplary gene transcription assays, Candida cells are incubated with the anti-Candida antibodies for a predetermined period of time after which they are used to infect epithelial tissues. The amount of IL-8 secreted by the tissues in response to Candida infection is detected using sandwich ELISA assays with an biotin-labeled anti-IL-8 monoclonal antibody and avidin-alkaline phosphatase. The ability of the anti-Candida antibodies to reduce the expression of IL-8, as quantitated via optical measurements at 405 nm, indicates their ability to inhibit the tissue damage correlated with increased expression of IL-8 in response to Candida infection.

[0536] 3. In Vivo Animal Models for Assessing Antibody Efficacy

[0537] In vivo studies using animal models can be performed to assess the efficacy of the anti-Candida antibodies provided herein. A variety of assays, such as those employing in vivo animal models, are available to those of skill in the art for evaluating the ability of the anti-Candida antibodies to inhibit or treat Candida yeast infection. The therapeutic effect of the anti-Candida antibodies can be assessed using animal models of the pathogenic infection, including, but not limited to, animal models of oral, vaginal, gastrointestinal, systemic, and corneal yeast infection and septic arthritis. Such animal models are known in the art, and include, but are not limited to, animal models for Candida infection in nematode, silkworm, drosophila, rat, inbred mouse, and rabbit (see, e.g., Pukkila-Worley et al. (2009) Eukaryot Cell. 8(11):1750-8; Pukkila-Worley et al. (2009) Curr Med. Chem. 16(13):1588-95; Hanaoka et al. (2008) Eukaryot Cell. 7(10):1640-8; Chamilos et al. (2009) J Infect Dis. 200(1):152-7; Naglik et al. (2008) FEMS Microbiol Lett. 283(2):129-39; Saleem et al. (2007) West Indian Med J 56(6):526-9; Amanai et al. (2008) Mycopathologia. 166(3):133-41; Clancy et al. (2009) Methods Mol Biol. 499:65-76; Lazzell et al. (2009) J Antimicrob Chemother. 64(3):567-70; Asmundsdottir et al. (2009) Clin Microbiol Infect. 15(6):576-85; Hasan et al. (2009) Microbes Infect. 11(8-9):753-61; Banerjee et al. (2008) Mol Biol Cell. 19(4):1354-65; US 2009/0081196; US 2007/0141088;). For in vivo testing of an antibody or composition's toxicity, any animal model system known in the art can be used, including, but not limited to, rats, mice, cows, monkeys, and rabbits.

[0538] Efficacy in treating or preventing Candida infection can be demonstrated by detecting the ability of anti-Candida antibodies provided herein to reduce the incidence of Candida infection, or to prevent, ameliorate or alleviate one or more symptoms associated with Candida infection. The treatment is considered therapeutic if there is, for example, amelioration of one or more symptoms or a decrease in mortality and/or morbidity following administration of antibodies provided herein.

[0539] Invertebrate models of Candida infection (e.g. Caenorhabiditis elegans, Silkworms, Drosophila) can be used in some instances to test anti-Candida antibodies for the ability to reduce mortality or increase survival time after the injection of a dose of Candida yeast that have been pre-incubated with anti-Candida antibodies. The extent of tissue destruction at a predetermined time after injection of antibody-treated Candida can be measured, for example, by histological and microscopic observation. Additionally, a reduction in mortality rate or an increase in survival time of animals injected with antibody-treated Candida cells can also be measured qualitatively. Decreases in mortality or increases in survival time indicate an ability of the anti-Candida antibodies to reduce the virulence of the fungal cells.

[0540] Rodent models of Candida infection (e.g. rats, mice, rabbits) can be used to test anti-Candida antibodies for the ability to reduce mortality after a lethal injection of Candida (see e.g., Clancy et al. (2009) Methods Mol Bio 499:65-76). For example, rodents can be pre-treated by passive immunization via a single intraperitoneal injection of the anti-Candida antibodies followed by intravenous injection of a lethal dose of yeast cells. The mortality of the animals can be plotted using Kaplan-Meier curves to examine the significance of any increase in survival of animals pretreated with anti-Candida antibodies.

[0541] The anti-Candida antibodies provided herein can be tested in vivo for the ability to prevent or ameliorate Candida infection of the eyes, joints, kidneys or oral, vaginal or gastrointestinal mucosa in rodents. Rodents can be pre-treated by passive immunization via a single intraperitoneal injection of the anti-Candida antibodies followed by inoculation of specific tissues (e.g. vaginal, oral or gastrointestinal mucosa) with yeast cells or injection of yeast cells into tissues (e.g. corneal stroma) or intravenously. Measurement of the severity of the infection (e.g. corneal ulceration, osteoarthritis as measured by micro-CT, immunohistochemistry of organ samples, CFU assessment of vaginal fluid or of homogenized kidney, liver, or spleen), techniques for which are known to those of skill in the art, can be used to assess the ability of the antibodies to prevent infection or ameliorate the symptoms of Candida infection.

[0542] Animal model studies using the anti-Candida antibodies provided herein can be extrapolated to humans and are useful for demonstrating the prophylactic and/or therapeutic utility of the anti-Candida antibodies.

### G. DIAGNOSTIC USES

[0543] The anti-Candida antibodies provided herein can be used in diagnostic assays for the detection, purification, and/or inhibition of Candida. Exemplary diagnostic assays include in vitro and in vivo detection of Candida. For example, assays using the anti-Candida antibodies provided herein for qualitatively and quantitatively measuring levels of Candida in an isolated biological sample (e.g., mucosal, urine, or blood sample) or in vivo are provided.

[0544] As described herein, the anti-Candida antibodies can be conjugated to a detectable moiety for in vitro or in vivo detection. Such antibodies can be employed, for example, to evaluate the localization and/or persistence of the anti-Candida antibody at an in vivo site, such as, for example, a mucosal site or internal site of infection. The anti-Candida antibodies which are coupled to a detectable moiety can be detected in vivo by any suitable method known in the art. The anti-Candida antibodies which are coupled to a detectable moiety also can be detected in isolated biological samples, such as tissue or fluid samples obtained from the subject following administration of the antibody.

[0545] 1. In Vitro Detection of Pathogenic Infection

[0546] In general, Candida can be detected in a subject or patient based on the presence of one or more Candida antigens (e.g. cell wall glycoproteins) and/or polynucleotides encoding such proteins in a biological sample (e.g., blood, sera, sputum urine and/or other appropriate cells or tissues) obtained from a subject or patient. Such proteins can be used as markers to indicate the presence or absence of Candida in a subject or patient. The anti-Candida antibodies provided herein can be employed for detection of the level of antigen and/or epitope that binds to the agent in the biological sample.

[0547] A variety of assay formats are known to those of ordinary skill in the art for using an anti-Candida to detect polypeptide markers in a sample (see, e.g., Harlow and Lane, Antibodies: A Laboratory Manual, Cold Spring Harbor Laboratory, 1988). In general, the presence or absence of Candida in a subject or patient can be determined by contacting a biological sample obtained from a subject or patient with an anti-Candida provided and detecting in the sample a level of antigen that binds to the anti-Candida antibody or antigen-binding fragment thereof.

[0548] In some examples, the assay involves the use of an anti-Candida antibody provided immobilized on a solid support to bind to and remove the target polypeptide from the remainder of the sample. The bound polypeptide can then be detected using a detection reagent that contains a reporter group and specifically binds to the antibody/polypeptide complex. Such detection reagents can comprise, for example, a binding agent that specifically binds to the polypeptide or an antibody or other agent that specifically binds to the binding agent.

[0549] In some examples, a competitive assay can be utilized, in which a polypeptide

[0550] (e.g. cell wall glycoprotein) is labeled with a reporter group and allowed to bind to the immobilized anti-Candida antibody or antigen-binding fragment thereof after incubation of the anti-Candida antibody thereof with the sample. The extent to which components of the sample inhibit the binding of the labeled polypeptide to the anti-Candida antibody is indicative of the reactivity of the sample with the immobilized anti-Candida antibody. Suitable polypeptides for use within such assays include full length Candida mannoprotein proteins that have been glycosylated.

[0551] The solid support can be any material known to those of ordinary skill in the art to which the protein can be attached. For example, the solid support can be a test well in a microtiter plate or a nitrocellulose or other suitable membrane. The support also can be a bead or disc, such as glass, fiberglass, latex or a plastic material such as polystyrene or polyvinylchloride. The support also can be a magnetic particle or a fiber optic sensor, such as those disclosed, for example, in U.S. Pat. No. 5,359,681. The anti-Candida antibody can be immobilized on the solid support using a variety of techniques known to those of skill in the art. The anti-Candida antibody can be immobilized by adsorption to a well in a microtiter plate or to a membrane. In such cases, adsorption can be achieved by contacting the anti-Candida antibody, in a suitable buffer, with the solid support for a suitable amount of time. The contact time varies with temperature, but is typically between about 1 hour and about 1 day. In general, contacting a well of a plastic microtiter plate (such as polystyrene or polyvinylchloride) with an amount of anti-Candida antibody ranging from about 10 ng to about 10 μg, and typically about 100 ng to about 1 μg, is sufficient to immobilize an adequate amount of anti-Candida antibody.

[0552] Covalent attachment of anti-Candida antibody to a solid support can generally be achieved by first reacting the support with a bifunctional reagent that will react with the support and a functional group, such as a hydroxyl or amino group, on the anti-Candida antibody. For example, the anti-Candida antibody can be covalently attached to supports having an appropriate polymer coating using benzoquinone or by condensation of an aldehyde group on the support with an amine and an active hydrogen on the binding partner (see, e.g., Pierce Immunotechnology Catalog and Handbook, 1991, at A12-A13).

[0553] In some examples, the assay is performed in a flow-through or strip test format, wherein the anti-Candida antibody is immobilized on a membrane, such as nitrocellulose. In the flow-through test, polypeptides within the sample bind to the immobilized anti-Candida antibody as the sample passes through the membrane. A second, labeled binding agent then binds to the anti-Candida antibody-polypeptide complex as a solution containing the second binding agent flows through the membrane.

[0554] Additional assay protocols exist in the art that are suitable for use with the Candida glycoproteins or anti-Candida antibodies provided. The above descriptions are intended to be exemplary only. For example, it will be apparent to those of ordinary skill in the art that the above protocols can be readily modified to use Candida polypeptides to detect antibodies that bind to such polypeptides in a biological sample. The detection of such protein-specific antibodies can allow for the identification of Candida infection.

[0555] To improve sensitivity, multiple Candida protein markers can be assayed within a given sample. It will be apparent that anti-Candida antibodies specific for different Candida polypeptides and/or carbohydrate moieties (i.e. oligomannose moieties and/or glucans) can be combined within a single assay. Further, multiple primers or probes can be used concurrently. The selection of Candida protein markers can be based on routine experiments to determine combinations that results in optimal sensitivity. In addition, or alternatively, assays for Candida proteins provided herein can be combined with assays for other known Candida antigens.

[0556] 2. In Vivo Detection of Pathogenic Infection

[0557] The anti-Candida antibodies provided herein can be employed as an in vivo diagnostic agent. For example, the anti-Candida antibodies can provide an image of infected tissues (e.g., Candida infection in the lungs) using detection methods such as, for example, magnetic resonance imaging, X-ray imaging, computerized emission tomography and other imaging technologies. For the imaging of Candida infected tissues, for example, the antibody portion of the anti-Candida antibody generally will bind to Candida cells, and the imaging agent will be an agent detectable upon imaging, such as a paramagnetic, radioactive or fluorescent agent that is coupled to the anti-Candida antibody. Generally, for use as a diagnostic agent, the anti-Candida antibody is coupled directly or indirectly to the imaging agent.

[0558] Many appropriate imaging agents are known in the art, as are methods for their attachment to the anti-Candida antibodies (see, e.g., U.S. Pat. Nos. 5,021,236 and 4,472,509). Exemplary attachment methods involve the use of a metal chelate complex employing, for example, an organic chelating agent such a DTPA attached to the antibody or antigen-binding (U.S. Pat. No. 4,472,509). The antibodies also can be reacted with an enzyme in the presence of a coupling agent such as glutaraldehyde or periodate. Conjugates with fluorescein markers are prepared in the presence of such coupling agents or by reaction with an isothiocyanate.

[0559] For in vivo diagnostic imaging, the type of detection instrument available is considered when selecting a given radioisotope. The radioisotope selected has a type of decay which is detectable for a given type of instrument. Another factor in selecting a radioisotope for in vivo diagnosis is that the half-life of the radioisotope be long enough so that it is still detectable at the time of maximum uptake by the target, but short enough so that deleterious radiation with respect to the host is minimized. Typically, a radioisotope used for in vivo imaging will lack a particle emission, but produce a large number of photons in the 140-250 keV range, which can be readily detected by conventional gamma cameras.

[0560] For in vivo diagnosis, radioisotopes can be bound to the antibodies provided either directly or indirectly by using an intermediate functional group. Exemplary intermediate functional groups which can be used to bind radioisotopes, which exist as metallic ions, to antibodies include bifunctional chelating agents, such as diethylene-triaminepentaacetic acid (DTPA) and ethylenediaminetetraacetic acid

[0561] (EDTA) and similar molecules. Examples of metallic ions which can be bound to the anti-Candida antibodies provided include, but are not limited to, ⁷²Arsenic, ²¹¹Astatine, ¹⁴Carbon, ⁵¹Chromium, ³⁶Chlorine, ⁵⁷Cobalt, ⁵⁸Cobalt, ⁶⁷Copper, ¹⁵²Europium, ⁶⁷Gallium, ⁶⁸Gallium, ³Hydrogen, ¹²³Iodine, ¹²⁵Iodine, ¹³¹Iodine, ¹¹¹Indium, ⁵⁹Iron, ³²Phosphorus, ¹⁸⁶Rhenium, ¹⁸⁸Rhenium, ⁹⁷Ruthenium, ⁷⁵Selenium, ³⁵Sulphur, ^{99m}Technetium, ²⁰¹Thallium, ⁹⁰Yttrium and ⁸⁹Zirconium.

[0562] The anti-Candida antibodies provided herein can be labeled with a paramagnetic isotope for purposes of in vivo diagnosis, as in magnetic resonance imaging (MRI) or electron spin resonance (ESR). In general, any conventional method for visualizing diagnostic imaging can be utilized. Generally, gamma and positron emitting radioisotopes are used for camera imaging and paramagnetic isotopes for MRI. Elements which are particularly useful in such techniques include, but are not limited to, ¹⁵⁷Gd, ⁵⁵Mn, ¹⁶²Dy, ⁵²Cr, and ⁵⁶Fe.

[0563] Exemplary paramagnetic ions include, but are not limited to, chromium (III), manganese (II), iron (III), iron (II), cobalt (II), nickel (II), copper (II), neodymium (III), samarium (III), ytterbium (III), gadolinium (III), vanadium (II), terbium (III), dysprosium (III), holmium (III) and erbium (III). Ions useful, for example, in X-ray imaging, include but are not limited to lanthanum (III), gold (III), lead (II), and bismuth (III).

[0564] The concentration of detectably labeled anti-Candida antibody which is administered is sufficient such that the binding to Candida is detectable compared to the background. Further, it is desirable that the detectably labeled anti-Candida antibody be rapidly cleared from the circulatory system in order to give the best target-to-background signal ratio.

[0565] The dosage of detectably labeled anti-Candida antibody for in vivo diagnosis will vary depending on such factors as age, sex, and extent of disease of the individual. The dosage of a human monoclonal antibody can vary, for example, from about 0.01 mg/m² to about 500 mg/m², 0.1 mg/m² to about 200 mg/m², or about 0.1 mg/m² to about 10 mg/m². Such dosages can vary, for example, depending on whether multiple injections are given, tissue, and other factors known to those of skill in the art.

[0566] 3. Monitoring Infection

[0567] The anti-Candida antibodies provided herein can be used in vitro and in vivo to monitor the course of pathogenic disease therapy. Thus, for example, the increase or decrease in the number of cells infected with Candida or changes in the concentration of the Candida virus particles present in the body or in various body fluids can be measured. Using such methods, the anti-Candida antibodies can be employed to determine whether a particular therapeutic regimen aimed at ameliorating the pathogenic disease is effective.

### H. PROPHYLACTIC AND THERAPEUTIC USES

[0568] The anti-Candida antibodies provided herein and pharmaceutical compositions containing anti-Candida antibodies provided herein can be administered to a subject for prophylaxis and therapy. For example, the anti-Candida antibodies provided can be administered for treatment of a disease or condition, such as a Candida infection. In some examples, the antibodies provided can be administered to a subject for prophylactic uses, such as the prevention and/or spread of Candida infection, including, but not limited to the inhibition of establishment of Candida infection in a host or inhibition of Candida transmission between subjects. The antibodies or antigen-binding fragments thereof also can be administered to a subject for preventing, treating, and/or alleviating of one or more symptoms of a Candida infection or reduce the duration of a Candida infection.

[0569] In some examples, administration of an anti-Candida antibody provided herein inhibits the incidence of Candida infection by at least or about 99%, at least or about 95%, at least or about 90%, at least or about 85%, at least or about 80%, at least or about 75%, at least or about 70%, at least or about 65%, at least or about 60%, at least or about 55%, at least or about 50%, at least or about 45%, at least or about 40%, at least or about 35%, at least or about 30%, at least or about 25%, at least or about 20%, at least or about 15%, or at least or about 10% relative to the incidence of Candida infection in the absence of the anti-Candida antibody. In some examples, administration of an anti-Candida antibody provided herein decreases the severity of one or more symptoms of Candida infection by at least or about 99%, at least or about 95%, at least or about 90%, at least or about 85%, at least or about 80%, at least or about 75%, at least or about 70%, at least or about 65%, at least or about 60%, at least or about 55%, at least or about 50%, at least or about 45%, at least or about 40%, at least or about 35%, at least or about 30%, at least or about 25%, at least or about 20%, at least or about 15%, or at least or about 10% relative to the severity of the one or more symptoms of Candida infection in the absence of the anti-Candida antibody.

[0570] 1. Subjects for Therapy

[0571] A subject or candidate for therapy with an anti-Candida antibody provided herein includes, but is not limited to, a subject, such as a human patient, that has been exposed to a Candida, a subject, such as a human patient, who exhibits one or more symptoms of a Candida infection and a subject, such as a human patient, who is at risk of a Candida infection. Exemplary Candida infections include those caused by Candida, such as, but not limited to, as oropharyngeal candidiasis (thrush), vulvovaginal candidiasis (vaginal candidiasis), candidemia, oral candidiasis, mucocutaneous candidiasis, or forms of disseminated candidiasis in organs such as, but not limited to brain, eye, heart, liver, spleen, kidney, or bone marrow. In some examples, the Candida infection is caused by C. albicans. In some examples, the Candida infection is caused by other Candida species such as, but not limited to, C. tropicalis, C. parapsilosis, C. krusei, C. glabrata, C. lusitaniae, C. dubliniensis or C. guilliermondii.

[0572] In some examples, the subject for therapy with an anti-Candida antibody provided herein is a mammal. In some examples, the subject for therapy with an anti-Candida antibody provided herein is a primate. In particular examples, the subject therapy with an anti-Candida antibody provided herein is a human.

[0573] The anti-Candida antibodies provided can be administered to a subject, such as a human patient, for the treatment of any Candida-mediated disease. For example, the anti-Candida antibodies provided can be administered to a subject to alleviate one or more symptoms or conditions associated with a Candida infection, including, but not limited to, oral ulceration, periodontitis, esophagitis, vaginitis and paronychia. Such diseases and condition are well known and readily diagnosed by physicians or ordinary skill.

[0574] The anti-Candida antibodies provided can be administered to a subject, such a human patient, having a Candida infection for the maintenance or suppression therapy of recurring Candida-mediated disease.

[0575] The anti-Candida antibodies provided can be administered to a subject, such as a human patient, at risk of a Candida infection, including, but not limited to, a prematurely born (pre-term) infant (e.g., a human infant born less than 38 weeks of gestational age, such as, for example, 29 weeks, 30 weeks, 31 weeks, 32 weeks, 33 weeks, 34 weeks, 35 weeks, 36 weeks, or 37 weeks gestational age); an infant (e.g., a human infant born more than 37 weeks gestational age), pregnant women, a subject having diabetes mellitus, congenital immunodeficiency, or acquired immunodeficiency (e.g., an AIDS patient), leukemia, non-Hodgkin lymphoma, an immunosuppressed patient, such as, for example, a recipient of a transplant (e.g. a bone marrow transplant or a kidney transplant), patients treated in intensive care units (ICUs), cancer patients receiving chemotherapy, elderly subjects, including individuals in nursing homes or rehabilitation centers, patients receiving invasive devices (catheters, artificial joints and valves), or patients receiving broad spectrum and/or large amounts of antibiotics.

[0576] Tests for various pathogens and pathogenic infection are known in the art and can be employed for the assessing whether a subject is a candidate for therapy with an anti-Candida antibody provided herein. For example, tests for Candida infection, are known and include for example, yeast culture assays, antigen detection test, microscopic examination, polymerase chain reaction (PCR) tests, and various antibody serological tests (e.g. measurement of D-arabinitol levels in the serum or urine). Tests for fungal infection can be performed on samples obtained from tissue or fluid samples, such as saliva, blood, urine, vaginal mucous, lung sputum, lavage or lymph sample.

[0577] 2. Dosages

[0578] The anti-Candida antibody is administered in an amount sufficient to exert a therapeutically useful effect in the absence of undesirable side effects on the patient treated. The therapeutically effective concentration of an anti-Candida antibody can be determined empirically by testing the polypeptides in known in vitro and in vivo systems such as by using the assays provided herein or known in the art.

[0579] An effective amount of antibody to be administered therapeutically will depend, for example, upon the therapeutic objectives, the route of administration, and the condition of the patient. In addition, the attending physician takes into consideration various factors known to modify the action of drugs, including severity and type of disease, patient's health, body weight, sex, diet, time and route of administration, other medications and other relevant clinical factors. Accordingly, it will be necessary for the therapist to titer the dosage of the antibody or antigen-binding fragment thereof and modify the route of administration as required to obtain the optimal therapeutic effect. Typically, the clinician will administer the antibody until a dosage is reached that achieves the desired effect. The progress of this therapy is easily monitored by conventional assays. Exemplary assays for monitoring treatment of a fungal infection are known in the art and include for example, antigen detection or yeast culture assays.

[0580] Generally, the dosage ranges for the administration of the anti-Candida antibodies provided herein are those large enough to produce the desired effect in which the symptom(s) of the pathogen-mediated disease (e.g. fungal disease) are ameliorated or the likelihood of fungal infection is decreased. In some examples, the anti-Candida antibodies provided herein are administered in an amount effective for inducing an immune response in the subject. The dosage is not so large as to cause adverse side effects, such as hyperviscosity syndromes, pulmonary edema or congestive heart failure. Generally, the dosage will vary with the age, condition, sex and the extent of the disease in the patient and can be determined by one of skill in the art. The dosage can be adjusted by the individual physician in the event of the appearance of any adverse side effect. Exemplary dosages for the prevention or treatment of a Candida infection and/or amelioration of one or more symptoms of a Candida infection include, but are not limited to, about or 0.01 mg/kg to about or 300 mg/kg, such as for example, about or 0.01 mg/kg, about or 0.1 mg/kg, about or 0.5 mg/kg, about or 1 mg/kg, about or 5 mg/kg, about or 10 mg/kg, about or 15 mg/kg, about or 20 mg/kg, about or 25 mg/kg, about or 30 mg/kg, about or 35 mg/kg, about or 40 mg/kg, about or 45 mg/kg, about or 50 mg/kg, about or 100 mg/kg, about or 150 mg/kg, about or 200 mg/kg, about or 250 mg/kg, about or 300 mg/kg.

[0581] For treatment of a fungal infection, the dosage of the anti-Candida antibodies can vary depending on the type and severity of the disease. The anti-Candida antibodies can be administered single dose, in multiple separate administrations, or by continuous infusion. For repeated administrations over several days or longer, depending on the condition, the treatment can be repeated until a desired suppression of disease symptoms occurs or the desired improvement in the patient's condition is achieved. Repeated administrations can include increased or decreased amounts of the anti-Candida antibody depending on the progress of the treatment. Other dosage regimens also are contemplated.

[0582] In some examples, the anti-Candida antibodies are administered one time, two times, three times, four times, five times, six times, seven times, eight times, nine times, ten times or more per day or over several days. In particular examples, the anti-Candida antibodies provided herein are administered one time, two times, three times, four times, five times, six time, seven times, eight times, nine times, ten times or more for the prevention or treatment of a Candida infection and/or amelioration of one or more symptoms of a Candida infection.

[0583] In some examples, the anti-Candida antibodies are administered in a sequence of two or more administrations, where the administrations are separated by a selected time period. In some examples, the selected time period is at least or about 1 day, 2 days, 3 days, 4 days, 5 days, 6 days, 1 week, 2 weeks, 3 weeks, 1 month, 2 months, or 3 months.

[0584] Therapeutic efficacy of a particular dosage or dosage regimen also can be assessed, for example, by measurement of fungal antigens in the subject prior to and following administration of one or more doses of the anti-Candida antibody thereof. Dosage amounts and/or frequency of administration can be modified depending on the desired rate of clearance of the Candida in the subject.

[0585] As will be understood by one of skill in the art, the optimal treatment regimen will vary and it is within the scope of the treatment methods to evaluate the status of the disease under treatment and the general health of the patient prior to, and following one or more cycles of therapy in order to determine the optimal therapeutic dosage and frequency of administration. It is to be further understood that for any particular subject, specific dosage regimens can be adjusted over time according to the individual need and the professional judgment of the person administering or supervising the administration of the pharmaceutical formulations, and that the dosages set forth herein are exemplary only and are not intended to limit the scope thereof. The amount of an anti-Candida antibody to be administered for the treatment of a disease or condition, for example a fungal infection (e.g. a Candida infection), can be determined by standard clinical techniques (e.g. fungal antigen detection assays). In addition, in vitro assays and animal models can be employed to help identify optimal dosage ranges. Such assays can provide dosages ranges that can be extrapolated to administration to subjects, such as humans. Methods of identifying optimal dosage ranges based on animal models are well known by those of skill in the art.

[0586] 3. Routes of Administration

[0587] The anti-Candida antibodies provided herein can be administered to a subject by any method known in the art for the administration of polypeptides, including for example systemic or local administration. The anti-Candida antibodies can be administered by routes, such as parenteral (e.g., intradermal, intramuscular, intraperitoneal, intravenous, subcutaneous, or intracavity), topical, epidural, or mucosal (e.g. intranasal, oral, vaginally, vulvovaginal, esophageal, oroesophageal, bronchial, or pulmonary). The anti-Candida antibodies can be administered externally to a subject, at the site of the disease for exertion of local or transdermal action. Compositions containing anti-Candida antibodies or antigen-binding fragments can be administered by any convenient route, for example by infusion or bolus injection, by absorption through epithelial or mucocutaneous linings (e.g., oral mucosa, vaginal, rectal and intestinal mucosa). Compositions containing anti-Candida antibodies or antigen-binding fragments can be administered together with other biologically active agents. The mode of administration can include topical or other administration of a composition on, in or around areas of the body that may come on contact with fluid, cells, or tissues that are infected, contaminated or have associated therewith a fungus, such as Candida. The anti-Candida antibodies provided can be administered by topical or aerosol routes for delivery directly to target organs, such as the lungs. In some examples, the anti-Candida antibodies provided can be administered as a controlled release formulation as such as by a pump (see, e.g., Langer (1990) Science 249:1527-1533; Sefton (1987) CRC Crit. Ref. Biomed. Eng. 14:20; Buchwald et al. (1980) Surgery 88:507; Saudek et al. (1989) N. Engl. J. Med. 321:574) or via the use of various polymers known in the art and described elsewhere herein.

[0588] In particular examples, the anti-Candida antibodies are administered by pulmonary delivery (see, e.g., U.S. Pat. Nos. 6,019,968, 5,985,320, 5,985,309, 5,934,272, 5,874,064, 5,855,913, 5,290,540, and 4,880,078; and PCT Publication Nos. WO 92/19244, WO 97/32572, WO 97/44013, WO 98/31346, and WO 99/66903). Exemplary methods of pulmonary delivery are known in the art and include, but are not limited to, aerosol methods, such as inhalers (e.g., pressurized metered dose inhalers (MDI), dry powder inhalers (DPI), nebulizers (e.g., jet or ultrasonic nebulizers) and other single breath liquid systems), intratracheal instillation and insufflation. In some examples, pulmonary delivery can be enhanced by co-administration of or administration of a co-formulation containing the anti-Candida antibodies provided and a permeation enhancer, such as, for example, surfactants, fatty acids, saccharides, chelating agents and enzyme inhibitors, such as protease inhibitors.

[0589] Appropriate methods for delivery, can be selected by one of skill in the art based on the properties of the dosage amount of the anti-Candida antibody or the pharmaceutical composition containing the antibody or antigen-binding fragment thereof. Such properties include, but are not limited to, solubility, hygroscopicity, crystallization properties, melting point, density, viscosity, flow, stability and degradation profile.

[0590] In some examples, the anti-Candida antibodies provided herein increase the efficacy mucosal immunization against Candida. Thus, in particular examples the anti-Candida antibodies are administered to a mucosal surface. For example, the anti-Candida antibodies can be delivered via routes such as oral (e.g., buccal, sublingual), ocular (e.g., corneal, conjunctival, intravitreally, intra-aqueous injection), intranasal, genital (e.g., vaginal), rectal, pulmonary, stomachic, or intestinal. The anti-Candida antibodies provided herein can be administered systemically, such as parenterally, for example, by injection or by gradual infusion over time or enterally (i.e. digestive tract). The anti-Candida antibodies provided herein also can be administered topically, such as for example, by topical installation or application (e.g., intratracheal instillation and insufflation) of liquid solutions, gels, pastes, creams, ointments, powders or by inhalation (e.g., nasal sprays, inhalers (e.g., pressurized metered dose inhalers (MDI), dry powder inhalers (DPI), nebulizers (e.g., jet or ultrasonic nebulizers) and other single breath liquid systems)). Administration can be effected prior to exposure to Candida or subsequent to exposure to Candida.

[0591] 4. Combination Therapies

[0592] The anti-Candida antibodies provided herein can be administered alone or in combination with one or more therapeutic agents or therapies for the prophylaxis and/or treatment of a disease or condition. For example, the anti-Candida antibodies provided can be administered in combination with one or more antifungal agents for the prophylaxis and/or treatment of a fungal infection, such as a respiratory fungal infection. In some examples, the respiratory fungal infection is a Candida infection. The antifungal agents can include agents to decrease and/or eliminate the pathogenic infection or agents to alleviate one or more symptoms of a pathogenic infection. In some examples, a plurality of antibodies or antigen-binding fragments thereof (e.g. one or more antifungal antibodies) also can be administered in combination, where at least one of the antibodies is an anti-Candida antibody provided herein. In some examples, a plurality of antibodies can be administered in combination for the prophylaxis and/or treatment of a Candida infection or multiple fungal infections, where at least one of the antibodies is an anti-Candida antibody provided herein. In some examples, the anti-Candida antibodies provided can be administered in combination with one or more antifungal antibodies, which bind to and inhibit Candida. In some examples, the anti-Candida antibodies provided can be administered in combination with one or more antibodies, which can inhibit or alleviate one or more symptoms of a fungal infection, such as a Candida infection. In some examples, two or more of the anti-Candida antibodies provided herein are administered in combination.

[0593] The one or more additional agents can be administered simultaneously, sequentially or intermittently with the anti-Candida antibody thereof. The agents can be co-administered with the anti-Candida antibody thereof, for example, as part of the same pharmaceutical composition or same method of delivery. In some examples, the agents can be co-administered with the anti-Candida antibody at the same time as the anti-Candida antibody thereof, but by a different means of delivery. The agents also can be administered at a different time than administration of the anti-Candida antibody thereof, but close enough in time to the administration of the anti-Candida antibody to have a combined prophylactic or therapeutic effect. In some examples, the one or more additional agents are administered subsequent to or prior to the administration of the anti-Candida antibody separated by a selected time period. In some examples, the time period is 1 day, 2 days, 3 days, 4 days, 5 days, 6 days, 1 week, 2 weeks, 3 weeks, 1 month, 2 months, or 3 months. In some examples, the one or more additional agents are administered multiple times and/or the anti-Candida antibody provided herein is administered multiple times.

[0594] In some examples, administration of the combination inhibits the incidence of Candida infection by at least or about 99%, at least or about 95%, at least or about 90%, at least or about 85%, at least or about 80%, at least or about 75%, at least or about 70%, at least or about 65%, at least or about 60%, at least or about 55%, at least or about 50%, at least or about 45%, at least or about 40%, at least or about 35%, at least or about 30%, at least or about 25%, at least or about 20%, at least or about 15%, or at least or about 10% relative to the incidence of Candida infection in the absence of the combination. In some examples, administration of the combination decreases the severity of one or more symptoms of Candida infection by at least or about 99%, at least or about 95%, at least or about 90%, at least or about 85%, at least or about 80%, at least or about 75%, at least or about 70%, at least or about 65%, at least or about 60%, at least or about 55%, at least or about 50%, at least or about 45%, at least or about 40%, at least or about 35%, at least or about 30%, at least or about 25%, at least or about 20%, at least or about 15%, or at least or about 10% relative to the severity of the one or more symptoms of Candida infection in the absence of the combination.

[0595] In some examples, the combination inhibits the binding of Candida to its host cell receptor by at least or about 99%, at least or about 95%, at least or about 90%, at least or about 85%, at least or about 80%, at least or about 75%, at least or about 70%, at least or about 65%, at least or about 60%, at least or about 55%, at least or about 50%, at least or about 45%, at least or about 40%, at least or about 35%, at least or about 30%, at least or about 25%, at least or about 20%, at least or about 15%, or at least or about 10% relative to the binding of Candida to its host cell receptor in the absence of the combination. In some examples, the combination inhibits Candida replication by at least or about 99%, at least or about 95%, at least or about 90%, at least or about 85%, at least or about 80%, at least or about 75%, at least or about 70%, at least or about 65%, at least or about 60%, at least or about 55%, at least or about 50%, at least or about 45%, at least or about 40%, at least or about 35%, at least or about 30%, at least or about 25%, at least or about 20%, at least or about 15%, or at least or about 10% relative to Candida replication in the absence of the combination.

[0596] Any therapy which is known to be useful, or which is or has been used for the prevention, management, treatment, or amelioration of a Candida infection or one or more symptoms thereof can be used in combination with anti-Candida antibody provided herein (see, e.g., Gilman et al., Goodman and Gilman's: The Pharmacological Basis of Therapeutics, 10th ed., McGraw-Hill, New York, 2001; The Merck Manual of Diagnosis and Therapy, Berkow, M. D. et al. (Eds.), 17th Ed., Merck Sharp & Dohme Research Laboratories, Rahway, N.J., 1999; Cecil Textbook of Medicine, 20th Ed., Bennett and Plum (Eds.), W.B. Saunders, Philadelphia, 1996, for information regarding therapies (e.g., prophylactic or therapeutic agents) which have been or are used for preventing, treating, managing, or ameliorating a Candida infection or one or more symptoms thereof). Examples of such agents include, but are not limited to, immunomodulatory agents, anti-inflammatory agents (e.g., adrenocorticoids, corticosteroids (e.g., beclomethasone, budesonide, flunisolide, fluticasone, triamcinolone, methylprednisolone, prednisolone, prednisone, hydrocortisone), glucocorticoids, steroids, non-steroidal anti-inflammatory drugs (e.g. aspirin, ibuprofen, diclofenac, and COX-2 inhibitors), pain relievers, leukotriene antagonists (e.g., montelukast, methyl xanthines, zafirlukast, and zileuton), bronchodilators, such as β₂-agonists (e.g., bambuterol, bitolterol, clenbuterol, fenoterol, formoterol, indacaterol, isoetharine, metaproterenol, pirbuterol, procaterol, reproterol, rimiterol, salbutamol (Albuterol, Ventolin), levosalbutamol, salmeterol, tulobuterol and terbutaline) and anticholinergic agents (e.g., ipratropium bromide and oxitropium bromide), sulphasalazine, penicillamine, dapsone, antihistamines, anti-malarial agents (e.g., hydroxychloroquine), antifungal agents and antifungal agents.

[0597] Exemplary antifungal agents for the treatment of fungal infections that can be administered in combination with the anti-Candida antibodies provided include, but are not limited to, fluconazole, itraconazole, voriconazole, ketoconazole, miconazole, terconazole, clotrimazole, econazole, fenticonazole, sulconazole, tioconazole, isoconazole, omoconazole, oxiconazole, flutrimazole, butoconazole, amphotericin, nystatin, flucytosine, caspofungin, terbinafine, and gentian violet.

[0598] The anti-Candida antibodies provided herein also can be administered in combination with one or more therapies for the treatment of a fungal infection, such as an HIV infection. In exemplary therapies, administration anti-Candida antibodies with one or more fungal agents can treat the fungal infection and decrease the risk of opportunistic fungal infections by Candida. Exemplary antifungal agents that can be selected for combination therapy with an anti-Candida antibody provided herein include, but are not limited to, antifungal compounds, antifungal proteins, antifungal peptides, antifungal protein conjugates and antifungal peptide conjugates, including, but not limited to, nucleoside analogs, nucleotide analogs, immunomodulators (e.g. interferons) and immunostimulants. Combination therapy using antibodies and/or anti-Candida antibodies and antigen-binding fragments provided herewith are contemplated as is combination with the antibodies and/or anti-Candida antibodies and antigen-binding fragments provided herein with other anti-Candida antibodies and anti-Candida antibodies and antigen-binding fragments.

[0599] The anti-Candida antibodies provided herein also can be administered in combination with one or more agents capable of stimulating cellular immunity, such as cellular mucosal immunity. Any agent capable of stimulatory cellular immunity can be used. Exemplary immunostimulatory agents include, cytokines, such as, but not limited to, interferons (e.g., IFN-α, β, γ, ω), lymphokines and hematopoietic growth factors, such as, for example, GM-CSF (granulocyte macrophage colony stimulating factor), Interleukin-2 (IL-2), Interleukin-3 (IL-3), Interleukin-4 (IL-4), Interleukin-7 (IL-7), Interleukin-10 (IL-10), Interleukin-12 (IL-12), Interleukin-14 (IL-14), and Tumor Necrosis Factor (TNF).

[0600] For combination therapies with anti-pathogenic agents, dosages for the administration of such compounds are known in the art or can be determined by one skilled in the art according to known clinical factors (e.g., subject's species, size, body surface area, age, sex, immunocompetence, and general health, duration and route of administration, the kind and stage of the disease, and whether other treatments, such as other anti-pathogenic agents, are being administered concurrently).

[0601] The anti-Candida antibodies provided herein can be administered in combination with one or more additional antibodies or antigen-binding fragments thereof. In some examples, the one or more additional antibodies are antifungal antibodies. In some examples, the one or more additional antibodies bind to a fungal antigen, such as a Candida antigen. In some examples, the one or more additional antibodies bind to a Candida antigen that is a surface protein, such as a cell wall glycoprotein (e.g. a mannoprotein) or other cell wall component (e.g. glucans).

[0602] Antibodies for use in combination with an anti-Candida antibody provided herein include, but are not limited to, monoclonal antibodies, multispecific antibodies, synthetic antibodies, human antibodies, humanized antibodies, chimeric antibodies, intrabodies, single-chain Fvs (scFv), single chain antibodies, Fab fragments, F(ab′) fragments, disulfide-linked Fvs (sdFv), and anti-idiotypic (anti-Id) antibodies (including, e.g., anti-Id antibodies to antibodies provided herein), and epitope-binding fragments of any of the above. The antibodies for use in combination with an anti-Candida antibody provided herein can be of any type (e.g., IgG, IgE, IgM, IgD, IgA and IgY), class (e.g., IgG₁, IgG₂, IgG₃, IgG₄, IgA₁ and IgA₂) or subclass of immunoglobulin molecule. Antibodies for use in combination with an anti-Candida antibody or antigen-binding fragment thereof provided herein can be from any animal origin, including birds and mammals (e.g., human, murine, donkey, sheep, rabbit, goat, guinea pig, camel, horse, or chicken). The antibodies for use in combination with an anti-Candida antibody provided herein can be monospecific, bispecific, trispecific or of greater multispecificity. In some examples, the antibody for use in combination with an anti-Candida antibody provided herein includes, but is not limited to, anti-glucan antibodies, anti-mannoprotein antibodies, anti-integrin-like protein antibodies, and antibodies that bind to Candida secretory aspartic proteases In some examples, the antibody for use in combination with an anti-Candida antibody provided herein includes, but is not limited to, anti-Candida antibodies described in, for example, U.S. Pat. Nos. 4,670,382, 6,488,929, 6,774,219, and 7,138,502; U.S. Pat. Pub. Nos. 2004/0142385, 2006/0034849, 2005/0287146, 2007/019378, 2006/0251680, 2007/0116706, 2008/0193450, 2009/0214566, and 2009/0081196; PCT Pub. Nos. WO 86/02365, WO 99/52922, WO 04/03622, WO 03/089607, WO 2005/060713, WO 2006/097689, WO 2006/050343, and Maragues et al. (2003) Infection and Immunity 71(9):5273-5279.

[0603] 5. Gene Therapy

[0604] In some examples, nucleic acids comprising sequences encoding the anti-Candida antibodies and/or derivatives thereof, are administered to treat, prevent or ameliorate one or more symptoms associated with Candida infection, by way of gene therapy. Gene therapy refers to therapy performed by the administration to a subject of an expressed or expressible nucleic acid. In this example, the nucleic acids produce their encoded antibody or antigen-binding fragment thereof that mediates a prophylactic or therapeutic effect.

[0605] Any of the methods for gene therapy available in the art can be employed for administration of nucleic acid encoding the anti-Candida antibodies and/or derivatives thereof. Exemplary methods are described below.

[0606] For general reviews of the methods of gene therapy, see, for example, Goldspiel et al. (1993) Clinical Pharmacy 12:488-505; Wu and Wu (1991) Biotherapy 3:87-95; Tolstoshev (1993) Ann. Rev. Pharmacol. Toxicol. 32:573-596; Mulligan (1993) Science 260:926-932; Morgan and Anderson (1993) Ann. Rev. Biochem. 62:191-217; and TIBTECH 11(5):155-215. Methods commonly known in the art of recombinant DNA technology which can be used are described in Ausubel et al. (eds.), Current Protocols in Molecular Biology, John Wiley & Sons, NY (1993); and Kriegler, Gene Transfer and Expression, A Laboratory Manual, Stockton Press, NY (1990).

[0607] In some examples, a composition provided herein contains nucleic acids encoding an anti-Candida antibody and/or derivative thereof, where the nucleic acids are part of an expression vector that expresses the anti-Candida antibody and/or derivative thereof in a suitable host. In particular, such nucleic acids have promoters, such as heterologous promoters, operably linked to the antibody coding region, said promoter being inducible or constitutive, and, optionally, tissue-specific. In another particular examples, nucleic acid molecules are used in which the antibody coding sequences and any other desired sequences are flanked by regions that promote homologous recombination at a desired site in the genome, thus providing for intrachromosomal expression of the antibody encoding nucleic acids (Koller and Smithies (1989) Proc. Natl. Acad. Sci. USA 86:8932-8935; Zijlstra et al. (1989) Nature 342:435-438). In some examples, the expressed antibody molecule is a single chain antibody. In some examples, the nucleic acid sequences include sequences encoding the heavy and light chains, or fragments thereof, of the antibody. In a particular example, the nucleic acid sequences include sequences encoding an anti-Candida domain-exchanged Fab fragment. In a particular example, the nucleic acid sequences include sequences encoding a full-length anti-Candida domain-exchanged antibody. In some examples, the encoded anti-Candida antibody is a chimeric antibody.

[0608] Delivery of the nucleic acids into a subject can be either direct, in which case the subject is directly exposed to the nucleic acid or nucleic acid-carrying vectors, or indirect, in which case, cells are first transformed with the nucleic acids in vitro, then transplanted into the subject. These two approaches are known, respectively, as in vivo or ex vivo gene therapy.

[0609] In some examples, the nucleic acid sequences are directly administered in vivo, where it is expressed to produce the encoded product. This can be accomplished by any of numerous methods known in the art, for example, by constructing them as part of an appropriate nucleic acid expression vector and administering it so that they become intracellular, for example, by infection using defective or attenuated retroviral or other viral vectors (see U.S. Pat. No. 4,980,286), or by direct injection of naked DNA, or by use of microparticle bombardment (e.g., a gene gun; Biolistic, Dupont), or coating with lipids or cell-surface receptors or transfecting agents, encapsulation in liposomes, microparticles, or microcapsules, or by administering them in linkage to a peptide which is known to enter the nucleus, by administering it in linkage to a ligand subject to receptor-mediated endocytosis (see, e.g., Wu and Wu (1987) J. Biol. Chem. 262:4429-4432) which can be used, for example, to target cell types specifically expressing the receptors. In some examples, nucleic acid-ligand complexes can be formed in which the ligand comprises a fusogenic viral peptide to disrupt endosomes, allowing the nucleic acid to avoid lysosomal degradation. In some examples, the nucleic acid can be targeted in vivo for cell specific uptake and expression, by targeting a specific receptor (see, e.g., PCT Publications WO 92/06180; WO 92/22635; WO92/203 16; WO93/14188, WO 93/20221). Alternatively, the nucleic acid can be introduced intracellularly and incorporated within host cell DNA for expression, by homologous recombination (Koller and Smithies (1989) Proc. Natl. Acad. Sci. USA 86:8932-8935; and Zijlstra et al. (1989) Nature 342:435-438).

[0610] In a some examples, viral vectors that contains nucleic acid sequences encoding an anti-Candida antibody and/or derivatives thereof are used. For example, a retroviral vector can be used (see, e.g., Miller et al. (1993) Meth. Enzymol. 217:581-599). Retroviral vectors contain the components necessary for the correct packaging of the viral genome and integration into the host cell DNA. The nucleic acid sequences encoding the antibody or antigen-binding fragment thereof to be used in gene therapy are cloned into one or more vectors, which facilitates delivery of the gene into a subject. More detail about retroviral vectors can be found, for example, in Boesen et al. (1994) Biotherapy 6:291-302. Other references illustrating the use of retroviral vectors in gene therapy include, for example, Clowes et al. (1994) J. Clin. Invest. 93:644-651; Klein et al. (1994) Blood 83:1467-1473; Salmons and Gunzberg (1993) Human Gene Therapy 4:129-141; and Grossman and Wilson (1993) Curr. Opin. in Genetics and Devel. 3:110-114.

[0611] Adenoviruses also are viral vectors that can be used in gene therapy. Adenoviruses are especially attractive vehicles for delivering genes to respiratory epithelia. Adenoviruses naturally infect respiratory epithelia where they cause a mild disease. Other targets for adenovirus-based delivery systems include the liver, central nervous system, endothelial cells, and muscle. Adenoviruses have the advantage of being capable of infecting non-dividing cells. Kozarsky and Wilson (1993) Current Opinion in Genetics and Development 3:499-503 present a review of adenovirus-based gene therapy. Bout et al. (1994) Human Gene Therapy 5:3-10 demonstrated the use of adenovirus vectors to transfer genes to the respiratory epithelia of rhesus monkeys. Other instances of the use of adenoviruses in gene therapy can be found, for examples, in Rosenfeld et al. (1991) Science 252:431-434; Rosenfeld et al. (1992) Cell 68:143-155; Mastrangeli et al. (1993) J. Clin. Invest. 91:225-234; PCT Publication WO94/12649; and Wang et al. (1995) Gene Therapy 2:775-783. In a particular example, adenovirus vectors are used to deliver nucleic acid encoding the an anti-Candida antibodies and/or derivatives thereof provided herein.

[0612] Adeno-associated virus (AAV) also can be used in gene therapy (Walsh et al. (1993) Proc. Soc. Exp. Biol. Med. 204:289-300; and U.S. Pat. No. 5,436,146). In a particular example, adeno-associated virus (AAV) vectors are used to deliver nucleic acid encoding the anti-Candida antibodies and/or derivatives thereof provided herein.

[0613] Another approach to gene therapy involves transferring a gene to cells in tissue culture by such methods as electroporation, lipofection, calcium phosphate mediated transfection, or viral infection. Generally, the method of transfer includes the transfer of a selectable marker to the cells. The cells are then placed under selection to isolate those cells that have taken up and are expressing the transferred gene. The cells expressing the gene are then delivered to a subject.

[0614] In some examples, the nucleic acid encoding an anti-Candida antibody and/or derivative thereof provided herein is introduced into a cell prior to administration in vivo of the resulting recombinant cell. Such introduction can be carried out by any method known in the art, including, but not limited to, transfection, electroporation, microinjection, infection with a viral or bacteriophage vector containing the nucleic acid sequences, cell fusion, chromosome-mediated gene transfer, microcell-mediated gene transfer, and spheroplast fusion. Numerous techniques are known in the art for the introduction of foreign genes into cells (see, e.g., Loeffler and Behr (1993) Meth. Enzymol. 217:599-618; Cohen et al. (1993) Meth. Enzymol. 217:618-644; Cline, M. J., Pharma. Ther. 29:69-92 (1985)) and can be used for the administration of nucleic acid encoding an anti-Candida antibody and/or derivatives thereof provided herein, provided that the necessary developmental and physiological functions of the recipient cells are not disrupted. The technique provides for the stable transfer of the nucleic acid to the cell, so that the nucleic acid is expressible by the cell and typically heritable and expressible by its cell progeny.

[0615] The resulting recombinant cells can be delivered to a subject by various methods known in the art. Recombinant blood cells (e.g., hematopoietic stem or progenitor cells) can be administered intravenously. The amount of cells for administration depends on various factors, including, for example, the desired prophylactic and/or therapeutic effect and patient state, and can be determined by one skilled in the art.

[0616] Cells into which a nucleic acid can be introduced for purposes of gene therapy encompass any desired, available cell type, and include, but are not limited to, epithelial cells, endothelial cells, keratinocytes, fibroblasts, muscle cells, hepatocytes; blood cells such as T lymphocytes, B lymphocytes, monocytes, macrophages, neutrophils, eosinophils, megakaryocytes, granulocytes; various stem or progenitor cells, in particular hematopoietic stem or progenitor cells, for example, as obtained from bone marrow, umbilical cord blood, peripheral blood, and fetal liver. In particular examples, the cell used for gene therapy is autologous to the subject.

[0617] In some examples in which recombinant cells are used in gene therapy, nucleic acid sequences encoding an anti-Candida and/or derivatives thereof provided herein are introduced into the cells such that they are expressible by the cells or their progeny, and the recombinant cells are then administered in vivo for therapeutic effect. In a particular example, stem or progenitor cells are used. Any stem and/or progenitor cells which can be isolated and maintained in vitro can be used (see e.g., PCT Publication WO 94/08598; Stemple and Anderson (1992) Cell 7 1:973-985; Rheinwald (1980) Meth. Cell Bio. 21A:229; and Pittelkow and Scott (1986) Mayo Clinic Proc. 61:771).

[0618] In a particular example, the nucleic acid to be introduced for purposes of gene therapy contains an inducible promoter operably linked to the coding region, such that expression of the nucleic acid is controllable by controlling the presence or absence of the appropriate inducer of transcription.

### I. PHARMACEUTICAL COMPOSITIONS, COMBINATIONS AND ARTICLES OF MANUFACTURE/KITS

[0619] 1. Pharmaceutical Compositions

[0620] Provided herein are pharmaceutical compositions containing an anti-Candida antibody or antigen-binding fragment thereof provided herein. The pharmaceutical composition can be used for therapeutic, prophylactic, and/or diagnostic applications. The anti-Candida antibodies provided herein can be formulated with a pharmaceutical acceptable carrier or diluent. Generally, such pharmaceutical compositions utilize components which will not significantly impair the biological properties of the antibody, such as the binding of to its specific epitope (e.g. binding to an epitope on a Candida cell, e.g. a mannoprotein). Each component is pharmaceutically and physiologically acceptable in the sense of being compatible with the other ingredients and not injurious to the patient. The formulations can conveniently be presented in unit dosage form and can be prepared by methods well known in the art of pharmacy, including but not limited to, tablets, pills, powders, liquid solutions or suspensions (e.g., including injectable, ingestible and topical formulations (e.g., eye drops, gels, pastes, creams, or ointments), aerosols (e.g., nasal sprays), liposomes, suppositories, pessaries, injectable and infusible solution and sustained release forms. See, e.g., Gilman, et al., (eds. 1990) Goodman and Gilman's: The Pharmacological Bases of Therapeutics, 8th Ed., Pergamon Press; and Remington's Pharmaceutical Sciences, 17th ed. (1990), Mack Publishing Co., Easton, Pa.; Avis, et al. (eds. 1993) Pharmaceutical Dosage Forms: Parenteral Medications Dekker, NY; Lieberman, et al. (eds. 1990) Pharmaceutical Dosage Forms: Tablets Dekker, NY; and Lieberman, et al., (eds. 1990) Pharmaceutical Dosage Forms: Disperse Systems Dekker, NY. When administered systematically, the therapeutic composition is sterile, pyrogen-free, generally free of particulate matter, and in a parenterally acceptable solution having due regard for pH, isotonicity, and stability. These conditions are known to those skilled in the art. Methods for preparing parenterally administrable compositions are well known or will be apparent to those skilled in the art and are described in more detail in, e.g., “Remington: The Science and Practice of Pharmacy (Formerly Remington's Pharmaceutical Sciences)”, 19th ed., Mack Publishing Company, Easton, Pa. (1995).

[0621] Pharmaceutical compositions provided herein can be in various forms, e.g., in solid, semi-solid, liquid, powder, aqueous, or lyophilized form. Examples of suitable pharmaceutical carriers are known in the art and include but are not limited to water, buffering agents, saline solutions, phosphate buffered saline solutions, various types of wetting agents, sterile solutions, alcohols, gum arabic, vegetable oils, benzyl alcohols, gelatin, glycerin, carbohydrates such as lactose, sucrose, amylose or starch, magnesium stearate, talc, silicic acid, viscous paraffin, perfume oil, fatty acid monoglycerides and diglycerides, pentaerythritol fatty acid esters, hydroxy methylcellulose, powders, among others. Pharmaceutical compositions provided herein can contain other additives including, for example, antioxidants, preservatives, antimicrobial agents, analgesic agents, binders, disintegrants, coloring, diluents, excipients, extenders, glidants, solubilizers, stabilizers, tonicity agents, vehicles, viscosity agents, flavoring agents, emulsions, such as oil/water emulsions, emulsifying and suspending agents, such as acacia, agar, alginic acid, sodium alginate, bentonite, carbomer, carrageenan, carboxymethylcellulose, cellulose, cholesterol, gelatin, hydroxyethyl cellulose, hydroxypropyl cellulose, hydroxypropyl methylcellulose, methylcellulose, octoxynol 9, oleyl alcohol, povidone, propylene glycol monostearate, sodium lauryl sulfate, sorbitan esters, stearyl alcohol, tragacanth, xanthan gum, and derivatives thereof, solvents, and miscellaneous ingredients such as crystalline cellulose, microcrystalline cellulose, citric acid, dextrin, dextrose, liquid glucose, lactic acid, lactose, magnesium chloride, potassium metaphosphate, starch, among others (see, generally, Alfonso R. Gennaro (2000) Remington: The Science and Practice of Pharmacy, 20th Edition. Baltimore, Md.: Lippincott Williams & Wilkins). Such carriers and/or additives can be formulated by conventional methods and can be administered to the subject at a suitable dose. Stabilizing agents such as lipids, nuclease inhibitors, polymers, and chelating agents can preserve the compositions from degradation within the body.

[0622] Pharmaceutical compositions suitable for use include compositions wherein one or more anti-Candida antibodies are contained in an amount effective to achieve their intended purpose. Determination of a therapeutically effective amount is well within the capability of those skilled in the art. Therapeutically effective dosages can be determined by using in vitro and in vivo methods as described herein. Accordingly, an anti-Candida antibody provided herein, when in a pharmaceutical preparation, can be present in unit dose forms for administration.

[0623] An anti-Candida antibody provided herein can be lyophilized for storage and reconstituted in a suitable carrier prior to use. This technique has been shown to be effective with conventional immunoglobulins and protein preparations and art-known lyophilization and reconstitution techniques can be employed.

[0624] An anti-Candida antibody provided herein can be provided as a controlled release or sustained release composition. Polymeric materials are known in the art for the formulation of pills and capsules which can achieve controlled or sustained release of the antibodies provided herein (see, e.g., Medical Applications of Controlled Release, Langer and Wise (eds.), CRC Pres., Boca Raton, Fla. (1974); Controlled Drug Bioavailability, Drug Product Design and Performance, Smolen and Ball (eds.), Wiley, New York (1984); Ranger and Peppas (1983) J. Macromol. Sci. Rev. Macromol. Chem. 23:61; see also Levy et al. (1985) Science 228:190; During et al. (1989) Ann. Neurol. 25:351; Howard et al. (1989) J. Neurosurg. 7 1:105; U.S. Pat. Nos. 5,679,377, 5,916,597, 5,912,015, 5,989,463, 5,128,326; and PCT Publication Nos. WO 99/15154 and WO 99/20253). Examples of polymers used in sustained release formulations include, but are not limited to, poly(2-hydroxy ethyl methacrylate), poly(methyl methacrylate), poly(acrylic acid), poly(ethylene-co-vinyl acetate), poly(methacrylic acid), polyglycolides (PLG), polyanhydrides, poly(N-vinyl pyrrolidone), poly(vinyl alcohol), polyacrylamide, poly(ethylene glycol), polylactides (PLA), poly(lactide-co-glycolides) (PLGA), and polyorthoesters. Generally, the polymer used in a sustained release formulation is inert, free of leachable impurities, stable on storage, sterile, and biodegradable. Any technique known in the art for the production of sustained release formulation can be used to produce a sustained release formulation containing one more anti-Candida antibodies provided herein.

[0625] In some examples, the pharmaceutical composition contains an anti-Candida antibody provided herein and one or more additional antibodies. In some examples, the one or more additional antibodies includes, but is not limited to, anti-Candida antibodies described in, for example, U.S. Pat. Nos. 4,670,382, 6,488,929, 6,774,219, and 7,138,502; U.S. Pat. Pub. Nos. 2004/0142385, 2006/0034849, 2005/0287146, 2007/019378, 2006/0251680, 2007/0116706, 2008/0193450, 2009/0214566, and 2009/0081196; PCT Pub. Nos. WO 86/02365, WO 99/52922, WO 04/03622, WO 03/089607, WO 2005/060713, WO 2006/097689, WO 2006/050343, and Maragues et al. (2003) Infection and Immunity 71(9):5273-5279.

[0626] 2. Articles of Manufacture/Kits

[0627] Pharmaceutical compositions of anti-Candida antibodies or nucleic acids encoding anti-Candida antibodies, or a derivative or a biologically active portion thereof can be packaged as articles of manufacture containing packaging material, a pharmaceutical composition which is effective for prophylaxis (i.e. vaccination, passive immunization) and/or treating Candida infection or Candida mediated disease or disorder, and a label that indicates that the antibody or nucleic acid molecule is to be used for vaccination and/or treating the infection, disease or disorder. The pharmaceutical compositions can be packaged in unit dosage forms contain an amount of the pharmaceutical composition for a single dose or multiple doses. The packaged compositions can contain a lyophilized powder of the pharmaceutical compositions containing the anti-Candida antibodies provided, which can be reconstituted (e.g. with water or saline) prior to administration.

[0628] The articles of manufacture provided herein contain packaging materials. Packaging materials for use in packaging pharmaceutical products are well known to those of skill in the art. Examples of pharmaceutical packaging materials include, but are not limited to, blister packs, bottles, tubes, inhalers, inhalers (e.g., pressurized metered dose inhalers (MDI), dry powder inhalers (DPI), nebulizers (e.g., jet or ultrasonic nebulizers) and other single breath liquid systems), pumps, bags, vials, containers, syringes, bottles, and any packaging material suitable for a selected formulation and intended mode of administration and treatment. The pharmaceutical composition also can be incorporated in, applied to or coated on a barrier or other protective device that is used for contraception from infection or applied to or coated on invasive devices, such as catheters, artificial joints and valves.

[0629] The anti-Candida antibodies, nucleic acid molecules encoding the antibodies thereof, pharmaceutical compositions or combinations provided herein also can be provided as kits. Kits can optionally include one or more components such as instructions for use, devices and additional reagents (e.g., sterilized water or saline solutions for dilution of the compositions and/or reconstitution of lyophilized protein), and components, such as tubes, containers and syringes for practice of the methods. Exemplary kits can include the anti-Candida antibodies provided herein, and can optionally include instructions for use, a device for administering the anti-Candida antibodies to a subject, a device for detecting the anti-Candida antibodies in a subject, a device for detecting the anti-Candida antibodies in samples obtained from a subject, and a device for administering an additional therapeutic agent to a subject.

[0630] The kit can, optionally, include instructions. Instructions typically include a tangible expression describing the anti-Candida antibodies and, optionally, other components included in the kit, and methods for administration, including methods for determining the proper state of the subject, the proper dosage amount, dosing regimens, and the proper administration method for administering the anti-Candida antibodies. Instructions also can include guidance for monitoring the subject over the duration of the treatment time

[0631] Kits also can include a pharmaceutical composition described herein and an item for diagnosis. For example, such kits can include an item for measuring the concentration, amount or activity of the selected anti-Candida antibody in a subject.

[0632] In some examples, the anti-Candida antibody is provided in a diagnostic kit for the detection of Candida in an isolated biological sample (e.g., a fluid sample, such as blood, sputum, vaginal mucous, lavage, lung intubation sample, saliva, urine or lymph obtained from a subject). In some examples, the diagnostic kit contains a panel of one or more anti-Candida antibodies and/or one or more control antibodies (i.e. non-Candida binding antibodies), where one or more antibodies in the panel is an anti-Candida antibody provided herein.

[0633] Kits provided herein also can include a device for administering the anti-Candida antibodies to a subject. Any of a variety of devices known in the art for administering medications to a subject can be included in the kits provided herein. Exemplary devices include, but are not limited to, an inhaler (e.g., pressurized metered dose inhaler (MDI), dry powder inhaler (DPI), nebulizer (e.g., jet or ultrasonic nebulizers) and other single breath liquid system), a hypodermic needle, an intravenous needle, a catheter, and a liquid dispenser such as an eyedropper. Typically the device for administering the anti-Candida of the kit will be compatible with the desired method of administration of the anti-Candida antibodies.

[0634] 3. Combinations

[0635] Provided are combinations of the anti-Candida antibodies provided herein and a second agent, such as a second anti-Candida antibody or other therapeutic or diagnostic agent. A combination can include any anti-Candida antibody or reagent for effecting therapy thereof in accord with the methods provided herein. For example, a combination can include any anti-Candida antibody and an antifungal agent. Combinations also can include an anti-Candida antibody provided herein with one or more additional therapeutic antibodies. Combinations of the anti-Candida antibodies thereof provided also can contain pharmaceutical compositions containing the anti-Candida antibodies or host cells containing nucleic acids encoding the anti-Candida antibodies as described herein. The combinations provided herein can be formulated as a single composition or in separate compositions.

### J. EXAMPLES

[0636] The following examples are included for illustrative purposes only and are not intended to limit the scope of the invention.

### Example 1

### Design and Production of Vectors for Phage Display of Variant 2G12 Domain-Exchanged Antibody Libraries

[0637] Antibodies described herein that have an improved affinity for Candida albicans compared to 2G12 were identified by screening phage display libraries of variant 2G12 domain-exchanged antibodies. The template vector employed for the production of variant 2G12 domain-exchanged antibodies was generated from the 2G12 pCAL IT* vector (SEQ ID NO: 1) described in U.S. Provisional Application No. 61/192,982 and U.S. Patent Pub. No. 2010-0093563.

[0638] The 2G12 pCAL IT* vector was generated using a series of vector modifications (pCAL G13→2G12 pCAL 13→2G12 pCAL ITPO→2G12 pCAL IT*) designed to optimize the expression and decrease the toxicity of domain-exchanged antibodies in order to improve the phage display of the antibody fragments. The sequential vector modifications are briefly described below and in further detail in U.S. Provisional Application No. 61/192,982 and U.S. Patent Pub. No. 2010-0093563. As described in Example 2 below, the phage display libraries of variant 2G12 domain-exchanged antibodies employed were based on randomization of light chain complementarity determining region 3 (CDR3) of 2G12. In order to assist with the construction of the library, the 2G12 pCAL IT* vector was further modified to introduce three alanine substitutions in the light chain CDR3 of 2G12. The modification changed the light chain CDR3 from QHYAGYSAT (SEQ ID NO: 2) to QHAAGAAAT (SEQ ID NO: 3). The resulting vector, 2G12 3Ala LC pCAL IT* (SEQ ID NO:23, see also FIG. 2), was employed as the template vector for randomization of the 2G12 light chain CDR3. Construction of this vector is described in detail below.

[0639] 1. pCAL G13

[0640] The phagemid vector pCAL G13 (SEQ ID NO: 5) vector is a vector that can be used for display of peptides, such as antibody polypeptides, particularly for display of domain-exchanged antibody fragments. The vector contains a truncated (C-terminal) M13 phage gene III sequence and an amber stop codon (TAG), upstream of the gene III sequence.

Using standard recombinant methods, pCAL G13 was constructed by insertion of (1) nucleic acid containing a lacZ promoter with cloning sites for insertion of the heavy and light chain antibody genes and (2) nucleic acid encoding the gene III minor coat protein from M13 mp18 phage (PCR fragment amplified from M13 mp18 DNA (New England Biolabs) with primers for introduction of an amber stop codon (TAG) upstream of the gene III sequence) into the SapI and PvuI sites of the pBlueScript II KS(+) vector (Stratagene). The identity of the resulting vector, pCAL G13, was confirmed by restriction enzyme analysis and sequencing.

[0641] 2. 2G12 pCAL G13

[0642] The pCAL G13 phagemid vector (SEQ ID NO: 5) then was used to generate the 2G12 pCAL G13 vector (SEQ ID NO: 6) for display of the 2G12 domain-exchanged Fab fragment. The 2G12 pCAL G13 vector contains nucleic acid encoding a 2G12 light chain fragment (V_{L} and C_{L}) (SEQ ID NO: 7), and a 2G12 heavy chain fragment (V_{H} and C_{H}1) (SEQ ID NO: 8). The 2G12 heavy chain-encoding polynucleotide in the vector is directly upstream of an amber stop codon (TAG). This design of the vector resulted in a vector for expression of both 2G12 heavy chain-gene III fusion polypeptide and soluble 2G12 heavy chain (V_{H}/C_{H}1) polypeptides from the same genetic element, which can be used for display of the domain-exchanged antibodies on phage.

[0643] The 2G12 pCAL G13 vector was made by inserting a nucleic acid encoding a light chain domain of the 2G12 antibody (SEQ ID NO: 7) and heavy chain domain of the same antibody (SEQ ID NO: 8) into the pCAL G13 vector (SEQ ID NO: 5), described above, along with a sequence of nucleotides encoding an HA tag (SEQ ID NO: 9: YPYDVPDYA). The 2G12 heavy and light chains encoded by these nucleic acids contained the sequence of amino acids set forth in SEQ ID NOS: 10 and 11, respectively. The resulting 2G12 pCAL G13 vector contained the nucleic acid sequence set forth in SEQ ID NO: 6.

[0644] 3. 2G12 pCAL ITPO Vector

[0645] The 2G12 pCAL G13 vector (SEQ ID NO: 6) was then modified by replacement of the 5′-truncated lac I gene with the lac I gene promoter (i) and the entire lac I gene, tHP terminator, and lac promoter/operon gene to create the 2G12 pCAL ITPO vector (SEQ ID NO: 12) in order to restore IPTG inducible gene expression.

[0646] The lac I gene promoter and lac I gene, the tHP terminator gene, and the Lac promoter and operon gene were amplified in three separate PCR reactions and then combined into a single PCR fragment using overlapping PCR. The resulting amplified product was inserted into the 2G12 pCAL G13 vector (digested with SapI/SgrAI to release the 5′-truncated lac I gene). The identity of the resulting 2G12 pCAL ITPO vector (SEQ ID NO:12) was confirmed by DNA sequencing.

[0647] 4. 2G12 pCAL IT* Vector

[0648] To reduce the toxicity of the domain-exchanged Fab fragments expressed from the vector, and thereby increase stability of the phagemids displaying the Fab fragments, the 2G12 pCAL IT* vector (SEQ ID NO:1) was generated, in which an additional amber stop codon (TAG) was introduced into each of the leader sequences upstream of the polynucleotides encoding the heavy and light chain fragments. This phagemid vector was made by modifying the 2G12 pCAL ITPO vector (SEQ ID NO:12).

[0649] The 2G12 pCAL IT* vector can be used for repressed expression of the 2G12 Fab fragments in non-supE44 amber suppressor strains (such as, for example, NEB 10-beta cells and TOP10F′ cells), and modest expression in supE44 cells (e.g. XL1-Blue cells), for reduced expression and thus reduced toxicity of domain-exchanged Fab fragments in amber-suppressor strains such as XL1-Blue.

[0650] To generate the 2G12 pCAL IT* vector, the 2G12 pCAL ITPO vector (SEQ ID NO:12) was modified by introducing amber stop codons (TAG) at the 3′ end of the Pel B and Omp A bacterial leader sequences. The TAG amber stop codons were introduced to replace the wild-type CAG codon for glutamine.

[0651] Overlapping PCR mutagenesis was employed for the introduction the amber stop codons. Briefly, the Pel B and Omp A bacterial leader sequences were individually amplified using PCR primers, which contained the TAG mutation. Overlapping PCR was then employed to join the fragments. The resulting PCR product was then inserted into the 2G12 pCAL ITPO vector (digested with KasI and NotI), replacing the existing Pel B and Omp A bacterial leader sequences. The identity of the resulting 2G12 pCAL IT* vector was confirmed by DNA sequencing.

[0652] 5. 2G12 3Ala LC pCAL IT*

[0653] As described above, the 2G12 pCAL IT* vector was further modified by the introduction of three alanine amino acid substitutions in the light chain CDR3 of 2G12. The modification of the 2G12 pCAL IT* vector was carried out using overlapping PCR mutagenesis and cloning at the SgrAI and PacI sites of the 2G12 pCAL IT* vector to produce the 2G12 3Ala LC pCAL IT* vector (SEQ ID NO:23).

TABLE 3
2G12 3Ala LC pCAL IT* primers

| | | | SEQ |
|---|---|---|---|
| | | | ID |
| Name | nt | Sequences | NO |
| 2G12LCF1 | 42 | GCCGCTGTGCCATCGCTCAGTAACcaattgaa | 199 |
| | | ttaaggagga | |
| 2G12LCR1 | 35 | ggcggcgctcttcTAGCGAAGTCGTCGAACTG | 200 |
| | | CAG | |
| 2G12ALCF2 | 54 | GCTACCTACCACTGCCAGCACGCCGCGGGTGC | 201 |
| | | GGCCGCGACCTTCGGTCAGGGT | |
| 2G12ALCR2 | 54 | GGTACCCTGACCGAAGGTCGCGGCCGCACCCG | 202 |
| | | CGGCGTGCTGGCAGTGGTAGGT | |
| 2G12LCF3 | 35 | ggcggcgctcttcTACCCGTGTTGAAATCAAA | 203 |
| | | CGT | |
| 2G12LCR3 | 48 | GCCGCTGTGCCATCGCTCAGTAACTTAATTAA | 19 |
| | | TTAGCATTCACCACGG | |

The 2G12ALCF2 and 2G12ALCR2 primers contain a 5′ phosphate.

[0654] The 2G12ALCF2 and 2G12ALCR2 primers contain three codons (underlined and bold in Table 3 above) that mutate two tyrosines and one serine to alanine. In order to form the CDRL3 3ALA duplex, 50 μL 2G12ALCF2 (100 μM) and 50 μL 2G12ALCR2 (100 μM) were mixed with 1 μL of 5M NaCl. The mixture was denatured at 95° C. for 5 min and slowly cooled to ambient temperature (25° C.) on a heat block covered with a Styrofoam® box to allow duplex formation.

[0655] PCR amplification was carried out to generate two 2G12 light chain fragment duplexes. Duplexes in pool 1 (LC1) were 387 nucleotides in length, and duplexes in pool 2 (LC3) were 388 nucleotides in length. For this process, two pools of forward oligonucleotide primers (2G12LCF1 and 2G12LCF3) and two pools of reverse oligonucleotide primers (2G12LCR1 and 2G12LCR3) were synthesized. The sequences of the primers in each pool are set forth in Table 3, above.

[0656] Two of the primers, 2G12LCR1 and 2G12LCF3, contained a 5′ sequence of nucleotides corresponding to a SapI restriction endonuclease cleavage site (GCTCTTC) (SEQ ID NO: 29). This enzyme cuts duplex polynucleotides to leave a 3-nucleotide overhang of any sequence at its 5′ end, beginning at one nucleotide in the 3′ direction from this recognition sequence. The restriction endonuclease recognition site is indicated in italics in Table 3, above, while the three-nucleotide overhang in each primer pool is indicated in bold. The oligonucleotides were designed such that the potential three nucleotide overhang of each primer pool was complementary to one of the three nucleotide overhangs generated in the light chain fragment duplexes. The oligonucleotides were designed in this manner to facilitate ligation in a subsequent step.

[0657] Primers in the 2G12LCF1 pool contained a sequence of nucleotides corresponding to a MfeI restriction endonuclease recognition site. Primers in the 2G12LCR3 pool contained a sequence of nucleotides corresponding to a Pad restriction endonuclease site (the MfeI and PacI restriction sites are indicated in bold in Table 3). These restriction endonuclease recognition sites facilitated ligation of the assembled duplexes into vectors in subsequent steps.

[0658] Further, the forward primer pool 2G12LCF1 and the reverse primer pool 2G12LCR3 contained a non gene-specific sequence region that is identical to the CALX24 primer (SEQ ID NO:21) at the 5′ ends of the primers. Thus, the reference sequence duplexes LC1 and LC3, generated by PCR with these primers/oligonucleotides, contained a duplex of these regions at each end of the reference sequence duplex. These regions served as templates for the primer CALX24, which was used in the subsequent single primer amplification (SPA) step, described below.

[0659] To form duplexes using these primers, the 2G12 pCAL IT* vector was used as a template in three separate PCR amplifications. For these reactions, primer pair pools, 2G12LCF1/2G12LCR1 and 2G12LCF3/2G12LCR3, were used to amplify duplex pool LC1 and duplex pool LC3 (Table 4). For each reaction, 4 μL of each primer, 4 μL of the 2G12 pCAL IT* vector template incubated in the presence of 4 μL Advantage HF2 Polymerase Mix (Clontech), 20 μL of 10c HF2 reaction buffer, 20 μL of 10×dNTP mixture, 144 μL PCR grade water in a 200 μL reaction volume. The PCR was carried out using the following reaction conditions: 1 minute denaturation at 95° C., followed by 30 cycles of 5 seconds of denaturation at 95° C., 10 seconds of annealing at 50° C., and 30 seconds of extension at 68° C., then finishing with a 3 minute incubation at 68° C. The amplified fragments were gel-purified using a Gel Extraction Kit (Qiagen) according to the manufacturer's instruction. The purified products were run on 1 agarose gel and each fragment was gel-purified with Gel Extraction Kit (Qiagen) according to the manufacturer's instruction.

TABLE 4
Primer pairs for duplex pools

| Fragment | LC1 | LC3 |
|---|---|---|
| 5′ primer | 2G12LCF1 | 2G12LCF3 |
| 3′ primer | 2G12LCR1 | 2G12LCR3 |
| Size (bp) | 384 | 388 |

[0660] After amplification by PCR, 2 μg of LC1 (384 bp) and LC3 (388 bp) were digested with SapI (New England Biolabs). The digested fragments were purified with PCR purification column (Qiagen) according to the manufacturer's instruction.

[0661] The digested light chain duplexes and the 3ALA duplex were hybridized and ligated to form intermediate duplexes. This process was carried out as follows. The 3ALA duplex was mixed in equimolar amounts with both reference duplexes, LC1 and LC3, in the presence of 5×T4 DNA ligase buffer and ligated with T4 DNA Ligase in a 20 μL volume, at room temperature (˜25° C.) overnight. The reaction was purified with PCR purification column and run on 1% agarose gel and each fragment was gel purified (Qiagen) according to the manufacturer's instruction.

[0662] Following the formation of the intermediate duplexes, a single primer amplification (SPA) reaction was used to generate amplified randomized assembled duplexes. Amplification was carried out using 2 μL of the intermediate duplex and 1.2 μL CALX24 primer (100 μmol), in the presence of 2 μL Advantage HF2 Polymerase Mix, 10 μL 10×HF2 buffer, 10 μL 10×dNTP, 74.8 μL of PCR grade water in a 100 μL reaction volume. The PCR was carried out using the following reaction conditions: denaturation at 95° C. for 1 min, followed by 30 cycles of denaturation at 95° C. for 5 seconds, annealing and extension at 68° C. for 1 min, then finished with an incubation at 68° C. for 3 min. The resulting amplified assembled duplex was column purified with a PCR purification column (Qiagen) and run on 1% agarose gel and purified with Gel Extraction Kit (Qiagen) according to the manufacturer's instruction.

[0663] The 3ALA LC duplex cassette was digested with SgrAI and PacI restriction enzymes and purified over a PCR purification column (Qiagen), according to the manufacturer's instruction. The vector DNA, 2G12 pCAL IT*, also was digested with SgrAI and Pad, run on a 0.7% agarose gel, and purified using Gel Extraction Kit (Qiagen). The SgrAI/PacI digested vector and 3ALA LC duplex cassette were ligated in the presence of T4 DNA ligase (Invitrogen) and 5× ligation reaction buffer (Invitrogen) in a 20 μL reaction volume at ambient temperature (22-25° C.) overnight.

[0664] The ligated DNA was electroporated into NEB 10-beta cells (New England Biolabs) at 2000 V/0.1 cm and titrated onto LB agar plates containing 100 μg/mL of carbenicillin and 20 mM glucose. Single colonies were selected and amplified. Miniprep DNA were analyzed by DNA sequencing and the clone SP2 was selected for Maxiprep DNA preparation from a single bacterial colony on a LB agar plate containing 100 μg/mL of carbenicillin and 20 mM glucose.

### Example 2

### Generation of Variant 2G12 Nucleic Acid Libraries for Display of Collections of Variant 2G12 Domain-Exchanged Fab Fragments

[0665] To generate phage display libraries for selection of phage displayed domain-exchanged antibodies that have an increased affinity for C. albicans, nucleic acid libraries were generated by randomizing nucleotides encoding four of the nine amino acids in the CDR3 region of the 2G12 light chain. Specifically, the libraries were designed to separately randomize two different regions containing four sequential amino acid residues, namely A, G, Y, and S of the light chain CDR3QHYAGYSAT (SEQ ID NO: 2) and Q, H, Y, and A of the light chain of CDR3QHYAGYSAT (SEQ ID NO: 2). The nucleic acid libraries can be used to make phage display libraries containing variant polypeptides with diversity in portions of the CDR3 of the light chain variable region of a 2G12 domain-exchanged Fab target polypeptide.

[0666] Two methods of randomization were employed. The first method used overlap PCR mutagenesis with Single Primer Amplification, which involved PCR amplification of overlapping segments of the 2G12 light chain using randomized nucleic acid primers, which contain randomized positions within the 2G12 light chain CDR3 encoding region. The second method employed modified Fragment Assembly and Ligation/Single Primer Amplification (mFAL-SPA) (as described in U.S. Patent Pub. No. 2010-0081575), which involved generating a collection of duplex cassettes containing randomized nucleic acids, which have randomized positions within the 2G12 light chain CDR3 encoding region. Both methods are described in detail below.

[0667] As described in subsections of this example below, the nucleic acid encoding the 2G12 light chain in the 2G12 3Ala LC pCAL IT* vector described in Example 1 was replaced with either the randomized PCR fragments produced by overlap PCR mutagenesis or the collection of randomized cassettes produced by the mFAL-SPA method to generate the nucleic acid libraries.

### A. Randomization of 2G12 Light Chain CDR3 by Overlap PCR Mutagenesis/Single Primer Amplification

[0668] 1. AGYS Libraries

[0669] Overlap PCR generally involves PCR amplification of two or more overlapping segments of the gene of interest that can be subsequently recombined using an overlap fill-in reaction to reconstitute the full length gene. The process can be used to randomize a region of the gene by using oligonucleotide primers in the PCR amplification step which contain randomized nucleotides in addition to the nucleotides complementary to the template. Overlap PCR mutagenesis and Single Primer Amplification was used to diversify four amino acid positions in the 2G12 Fab by randomization of the 2G12 light chain CDR3 as follows.

[0670] a. Generation Overlapping Segments by PCR

[0671] Three AGYS nucleic acid libraries were generated by overlap PCR. For each library, a set of two overlapping segments of the 2G12 light chain were generated by PCR amplification. The oligonucleotide primers employed for the PCR amplifications are shown in Table 5.

[0672] A first segment, containing the nucleic acid encoding framework 1, CDR1, framework 2, CDR2, framework 3, and the first three amino acids of the CDR3 of the wild-type 2G12 light chain, was amplified as described below with a first oligonucleotide primer complementary to a region directly upstream of the 2G12 light chain in the 2G12 3Ala LC pCAL IT* vector (2G12LCF (SEQ ID NO: 13)) and a second oligonucleotide primer complementary to the region encoding several amino acids upstream of the CDR3 and the first three amino acids of the CDR3 (L3R (SEQ ID NO: 14)). This first segment does not contain any mutations relative to wild-type 2G12 and was used for all three libraries. The sequences of the primers used to amplify the first segment are set forth in Table 5. A MfeI restriction site (CAATTG) (SEQ ID NO: 20; shown in bold in Table 5) was designed in the 2G12LCF oligonucleotide to facilitate ligation of the library into vectors in subsequent steps. The underlined portion of the 2G12LCF oligonucleotide shown in Table 5 indicates a non gene-specific sequence that is identical to the CALX24 primer (SEQ ID NO: 21), which was used for the single primer amplification step described below.

[0673] A second segment, containing the nucleic acid encoding the entire CDR3 region of the 2G12 light chain and light chain constant region (C_{L}) was amplified as described below using a first oligonucleotide primer selected from those set forth in Table 5 containing randomized nucleotides in the light CDR3 region and a second oligonucleotide primer complementary to a region encoding the C-terminus of the 2G12 light chain (2G12LCR (SEQ ID NO: 19)). A PacI restriction site (TTAATTAA) (SEQ ID NO: 22; shown in bold in Table 5) was designed in the 2G12LCR oligonucleotide to facilitate to facilitate ligation of the library into vectors in subsequent steps. The underlined portion of the 2G12LCR oligonucleotide shown in Table 5 indicates a non gene-specific sequence that is identical to the CALX24 primer (SEQ ID NO: 21), which was used for the single primer amplification step described below.

[0674] Three pools of randomized oligonucleotides (AGYS, AGYS+1, and AGYS+2) were designed and generated for use in PCR amplification. The sequences of these randomized oligonucleotides are set forth in Table 5, below. Each oligonucleotide in each of these randomized pools was synthesized based on a reference sequence (which contained part of the native 2G12 light chain CDR3 nucleotide sequence), but contained randomized portions, represented in underlined type in Table 5. The CDR3 region is represented in bold type. The reference wild-type 2G12 sequence used to design the AGYS, AGYS+1, and AGYS+2 pools of randomized oligonucleotides is listed in Table 5. The region encoding the light chain CDR3 is indicated in bold.

[0675] The randomized portions of the oligonucleotides were synthesized using the NNK or NNT doping strategy. An NNK doping strategy minimizes the frequency of stop codons and ensures that each amino acid position encoded by a codon in the randomized portion could be occupied by any of the 20 amino acids. With this doping strategy, nucleotides were incorporated using an NKK pattern and a MNN pattern, during synthesis of the positive and negative strand randomized portions respectively, where N represents any nucleotide, K represents T or G, and M represents A or C. An NNT strategy eliminates stop codons and the frequency of each amino acid is less biased but omits Q, E, K, M, and W. The nucleotides in the randomized pools were labeled with 5′ phosphate groups.

TABLE 5
PCR mutagenesis/Single Primer Amplification
Primers

| | | | SEQ |
|---|---|---|---|
| | | | ID |
| Name | nt | Sequences | NO |
| 2G12LCF | 41 | GCCGCTGTGCCATCGCTCAGTAACaattgaattaa | 13 |
| | | ggagga | |
| L3R | 20 | ATAGTGCTGGCAGTGGTAGG | 14 |
| 2G12 | 55 | CTACCTACCACTGCCAGCACTACGCTGGTTACTCT | 15 |
| reference | | GCTACCTTCGGTCAGGGTAC | |
| sequence | | | |
| AGYS | 55 | CTACCTACCACTGCCAGCACTATNNKNNKNNKNNK | 16 |
| | | GCTACCTTCGGTCAGGGTAC | |
| AGYS+1 | 58 | CTACCTACCACTGCCAGCACTATNNKNNKNNKNNK | 17 |
| | | NNKGCTACCTTCGGTCAGGGTAC | |
| AGYS+2 | 61 | CTACCTACCACTGCCAGCACTATNNKNNKNNKNNK | 18 |
| | | NNKNNKGCTACCTTCGGTCAGGGTAC | |
| 2G12LCR | 48 | GCCGCTGTGCCATCGCTCAGTAACTTAATTAATTA | 19 |
| | | GCATTCACCACGG | |

The 2G12LCF, L3R and 2G12LCR primers were purified by HPLC. The AGYS, AGYS+1 and AGYS+2 primers contain a 5′ phosphate.

[0676] PCR amplification of the overlapping segments was performed using the primer pairs shown in Table 6. Each fragment was amplified using 10 ng of 2G12 3Ala LC pCAL IT* (SEQ ID NO: 23) (10 μL of 100 ng/μL stock) as a template with 10 μL of 20 μM 5′ and 3′ primers listed in Table 6 below in the presence of 10 μL of Advantage® HF2 Polymerase Mix (Clontech), 50 μL of 10×HF2 reaction buffer (Clontech), 50 μL of 10×dNTP mixture, and 360 μL of PCR grade water in a 500 reaction volume.

[0677] Each of the PCR amplifications (PCR 1a, 1b, 1b+1, 1b+2) included a denaturation step at 95° C. for 1 min, followed by 20 cycles of denaturation at 95° C. for 5 seconds, annealing at 50° C. for 10 seconds, and extension at 68° C. for 30 seconds, and finished with incubation at 68° C. for 1 min.

TABLE 6
PCR primers and resulting fragment sizes

| Fragment | PCR1a | PCR1b | PCR1b + 1 | PCR1b + 2 |
|---|---|---|---|---|
| 5′ primer | 2G12LCF | AGYS | AGYS + 1 | AGYS + 2 |
| 3′ primer | L3R | 2G12LCR | 2G12LCR | 2G12LCR |
| Size (bp) | 390 | 427 | 430 | 433 |

[0678] The amplified products from the PCR reactions were purified on a single PCR purification column (Qiagen). The purified products were run on 1% agarose gel and each fragment was gel-purified with Gel Extraction Kit (Qiagen) according to the manufacturer's instructions.

[0679] b. Overlap Fill-in Reaction

[0680] The overlapping segments generated from the PCR amplifications were rejoined to produce the nucleic acid library encoding full-length light chains, which contain the randomized CDR3 regions. The full-length nucleic acids were reconstructed by denaturation of the PCR amplified segments, annealing of the overlapping the nucleic acid, followed by an overlap fill-in reaction. Each library was constructed using 50 μL of PCR1Mix as shown in Table 7 for each library, 2 μL of Advantage® HF2 Polymerase Mix (Clontech), 10 μL of 10×HF2 reaction Buffer, 10 μL of 10×dNTP mixture, and 28 μL of PCR grade water in a 100 μL reaction volume. The calculated volumes for each of the PCR samples used in the fill-in reactions is shown in Table 7.

[0681] Each of the overlap reactions (AGYS, AGYS+1, and AGYS+2) included a denaturation step at 95° C. for 1 min, followed by 40 cycles of denaturation at 95° C. for 5 seconds, annealing at 60° C. for 10 seconds, and extension at 68° C. for 1 min, and finished with incubation at 68° C. for 3 min. The amplified products were run on 1% agarose gel and each fragment was purified with Gel Extraction Kit (Qiagen) according to the manufacturer's protocol

TABLE 7
Calculated volumes for PCR samples

| | Length | Amount needed for | Volume for |
|---|---|---|---|
| | of PCR | reaction: | fill-in |
| | fragment | 6.08 pmol (μg) | reaction |
| | (bp) | (3.64 × 10¹² molecules) | (μL) |
| PCR1a | 390 | 1.560 | 26.85 |
| PCR1b | 427 | 1.708 | 16.03 |
| PCR1b + 1 | 430 | 1.720 | 10.23 |
| PCR1b + 2 | 433 | 1.732 | 12.42 |

TABLE 8
PCR1 Mix for Overlap Reactions

| Library | AGYS | AGYS + 1 | AGYS + 2 |
|---|---|---|---|
| PCR1a (μL) | 26.85 | 26.85 | 26.85 |
| PCR1b (μL) | 16.03 | 0 | 0 |
| PCR1b + 1 (μL) | 0 | 10.23 | 0 |
| PCR1b + 2 (μL) | 0 | 0 | 12.42 |
| PCR grade water | 7.12 | 12.92 | 10.73 |
| (μL) | | | |
| Total (μL) | 50 | 50 | 50 |
| Size of combined | 794 | 797 | 800 |
| fragment (bp) | | | |

[0682] c. Single Primer Amplification (SPA)

[0683] SPA was performed by mixing 244 μL of PCR grade water, 50 μL of 10×HF2 buffer, 50 μL of 10×dNTP, 6 μL of CALX24 primer (100 μm) (SEQ ID NO: 21), 140 μL of each overlap fill-in reaction (AGYS, AGYS+1 or AGYS+2), and 10 μL of Advantage® HF2 Polymerase Mix in a 500 μL reaction volume.

[0684] Each of the SPA reactions included a denaturation step at 95° C. for 1 min, followed by 20 cycles of denaturation at 95° C. for 5 seconds, annealing and extension at 68° C. for 1 min, and finished with incubation at 68° C. for 3 min. The amplified products were column purified and run on 1% agarose gel and purified with Gel Extraction Kit (Qiagen).

[0685] d. Formation of the Variant 2G12 Nucleic Acid Libraries

[0686] Five μg of each library (AGYS, AGYS+1 or AGYS+2) was digested with MfeI and Pad restriction enzymes and purified over a PCR purification column (Qiagen). The vector DNA, 2G12 3Ala LC pCAL IT* (60 μg), also was digested with MfeI and Pad, run on a 0.7% agarose gel, and the 5139 bp vector fragment was purified using Gel Extraction Kit (Qiagen).

[0687] The MfeI/PacI digested vector and library fragments were ligated in the presence of 10 μL T4 DNA ligase (10 units) (Invitrogen) and 5× ligation reaction buffer (Invitrogen) in a 200 μL reaction volume at ambient temperature (22-25° C.) overnight. The ng and pmol amounts of the vector and library fragments used in the ligation reactions are shown in Table 9.

TABLE 9
Amounts of vector and library fragments used in ligation reactions

| Library | Amount | AGYS | AGYS + 1 | AGYS + 2 |
|---|---|---|---|---|
| Vector | ng | 1066.77 | 1066.77 | 8139.06 |
| | pmol | 0.316 | 0.315 | 2.405 |
| Fragment | ng | 385.58 | 387.142 | 2965.63 |
| | pmol | 0.789 | 0.790 | 6.026 |

[0688] e. Transformation

[0689] The ligation reactions were purified over PCR purification column (Qiagen) and electroporated into NEB 10-beta cells (New England Biolabs) at 2000 V in cuvettes with 0.1 cm gap. The cells were resuspended in SOC medium and incubated at 37° C. for 1 hr. Thirty mL of SuperBroth medium containing 20 μg/mL of carbenicillin and 20 mM of glucose were added to the culture and titrated on to LB agar plates containing 100 μg/mL of carbenicillin and 20 mM of glucose. The cells were incubated at 37° C. for 1 hr and added to 200 mL of SuperBroth medium with 50 μg/mL of carbenicillin and 20 mM of glucose. The culture was incubated overnight at 37° C. Maxiprep DNA was prepared from the overnight culture using HiSpeed Maxiprep Kit (Qiagen) according to the manufacturer's protocol.

[0690] The size of each library was 3.64×10⁸ for AGYS, 2.84×10⁸ for AGYS+1, and 1.59×10⁹ for AGYS+2.

[0691] 2. QHYA Library

[0692] a. Generation Overlapping Segments by PCR

[0693] A QHYA nucleic acid library was generated by overlap PCR in which two overlapping segments of the 2G12 light chain were generated by PCR amplification. The oligonucleotide primers employed for the PCR amplifications are shown in Table 10.

[0694] A first segment, containing the nucleic acid encoding framework 1, CDR1, framework 2, CDR2, and framework 3 of the wild-type 2G12 light chain, was amplified as described below with a first oligonucleotide primer complementary to a region directly upstream of the 2G12 light chain in the 2G12 3Ala LC pCAL IT* vector (2G12LCF1 (SEQ ID NO: 213)) and a second oligonucleotide primer complementary to the region encoding several amino acids upstream of the CDR3 (QHYA-R (SEQ ID NO: 214)). This first segment does not contain any mutations relative to wild-type 2G12. The sequences of the primers used to amplify the first segment are set forth in Table 10. An MfeI restriction site (CAATTG) (SEQ ID NO: 20; shown in bold in Table 10) was designed in the 2G12LCF1 oligonucleotide to facilitate ligation of the library into vectors in subsequent steps. The underlined portion of the 2G12LCF1 oligonucleotide shown in Table 10 indicates a non gene-specific sequence that is identical to the CALX24 primer (SEQ ID NO: 21), which was used for the single primer amplification step described below.

[0695] A second segment, containing the nucleic acid encoding the entire CDR3 region of the 2G12 light chain and light chain constant region (C_{L}) was amplified as described below using a first oligonucleotide primer selected from those set forth in Table 10 containing randomized nucleotides in the light CDR3 region and a second oligonucleotide primer complementary to a region encoding the C-terminus of the 2G12 light chain (2G12LCR3 (SEQ ID NO:217)). A Pad restriction site (TTAATTAA) (SEQ ID NO: 22; shown in bold in Table 10) was designed in the 2G12LCR3 oligonucleotide to facilitate ligation of the library into vectors in subsequent steps. The underlined portion of the 2G12LCR3 oligonucleotide shown in Table 10 indicates a non gene-specific sequence that is identical to the CALX24 primer (SEQ ID NO: 21), which was used for the single primer amplification step described below.

[0696] A randomized oligonucleotide (LCDR3-QHYA5′ (SEQ ID NO:216)) was designed and generated for use in PCR amplification. The sequence of the randomized oligonucleotide is set forth in Table 10, below. The oligonucleotide was synthesized based on a reference sequence (SEQ ID NO:215, which contained part of the native 2G12 light chain CDR3 nucleotide sequence), but contained a randomized portion, represented in underlined type in Table 10. The CDR3 region is represented in bold type. The reference wild-type 2G12 sequence used to design the randomized oligonucleotides is listed in Table 10. The region encoding the light chain CDR3 is indicated in bold. The randomized portion of the oligonucleotide was synthesized using the NNK doping strategy, as described in Section A.1.a above.

TABLE 10
PCR mutagenesis/Single Primer Amplification
Primers

| | | | SEQ |
|---|---|---|---|
| | | | ID |
| Name | nt | Sequences | NO |
| 2G12LCF1 | 42 | GCCGCTGTGCCATCGCTCAGTAACcaattgaa | 213 |
| | | ttaaggagga | |
| QHYA-R | 24 | GCAGTGGTAGGTAGCGAAGTCGTC | 214 |
| 2G12 | 70 | GACGACTTCGCGACCTACCACTGCCAGCACTA | 215 |
| reference | | CGCTGGTTACTCTGCTACCTTCGGTCAGGGTA | |
| sequence | | CCCGTG | |
| LCDR3- | 70 | GACGACTTCGCGACCTACCACTGCNNKNNKNN | 216 |
| QHYA5′ | | KNNKGGTTACTCTGCTACCTTCGGTCAGGGTA | |
| | | CCCGTG | |
| 2G12LCR3 | 48 | GCCGCTGTGCCATCGCTCAGTAACTTAATTAA | 217 |
| | | TTAGCATTCACCACGG | |

The 2G12LCF1 and 2G12LCR3 primers were purified by HPLC.

[0697] PCR amplification of the overlapping segments was performed using the primer pairs shown in Table 11. Each fragment was amplified using 10 ng of 2G12 3Ala LC pCAL IT* (SEQ ID NO: 23) as a template with 1 μL of 20 μM 5′ and 3′ primers listed in Table 11 below in the presence of 1 μL of Advantage® HF2 Polymerase Mix (Clontech), 5 μL of 10×HF2 reaction buffer (Clontech), 5 μL of 10×dNTP mixture, and 36 μL of PCR grade water in a 50 μL reaction volume.

[0698] Each of the PCR amplifications included a denaturation step at 95° C. for 1 min, followed by 30 cycles of denaturation at 95° C. for 5 seconds, annealing at 50° C. for 10 seconds, and extension at 68° C. for 1 min, and finished with incubation at 68° C. for 3 min.

TABLE 11
PCR primers and resulting fragment sizes

| Fragment | PCR1a | PCR1b |
|---|---|---|
| 5′ primer | 2G12LCF1 | LCDR3-QHYA5′ |
| 3′ primer | QHYA-R | 2G12LCR3 |
| Size (bp) | 382 | 437 |

[0699] The amplified products were run on 1% agarose gel and each fragment was gel-purified with Gel Extraction Kit (Qiagen) according to the manufacturer's instructions.

[0700] b. Overlap Fill-in Reaction and Single Primer Amplification (SPA)

[0701] The overlapping segments generated from the PCR amplifications were rejoined to produce the nucleic acid library encoding full-length light chain, which contain the randomized CDR3 region. Full-length nucleic acid was reconstructed by denaturation of the PCR amplified segments, annealing of the overlapping the nucleic acid, and an overlap fill-in reaction followed by SPA. Full length fragment was constructed using 20 μL of PCR1a, 20 μL of PCR1b, 20 μl of Advantage® HF2 Polymerase Mix (Clontech), 100 μL of 10×HF2 reaction Buffer, 100 μL of 10×dNTP mixture, 20 μL of CALX24 primer (100 μM) and 720 μL of PCR grade water in a 1000 μL reaction volume.

[0702] Overlap fill-in and SPA reaction included a denaturation step at 95° C. for 1 min, followed by 30 cycles of denaturation at 95° C. for 5 seconds, annealing and extension at 68° C. for 1 min, and finished with incubation at 68° C. for 3 min. The amplified products were column purified and run on 1% agarose gel and purified with Gel Extraction Kit (Qiagen), according to the manufacturer's instructions.

TABLE 12
PCR1 Mix for Overlap Reactions

| Library | QHYA |
|---|---|
| PCR1a (μL) | 20 |
| PCR1b (μL) | 20 |
| PCR grade water (μL) | 720 |
| Total (μL) | 1000 |
| Size of combined fragment (bp) | 795 |

[0703] c. Formation of the Variant 2G12 Nucleic Acid Libraries

[0704] Eight μg of amplified fragment was digested with MfeI and Pad restriction enzymes and purified over a PCR purification column (Qiagen). The vector DNA, 2G12 3Ala LC pCAL IT* (60 μg), also was digested with MfeI and PacI, run on a 0.7% agarose gel, and the 5139 bp vector fragment was purified using Gel Extraction Kit (Qiagen).

[0705] The MfeI/PacI digested vector and library fragments were ligated in the presence of 20 μL T4 DNA ligase (20 units) (Invitrogen) and 5× ligation reaction buffer (Invitrogen) in a 400 μL reaction volume at ambient temperature (22-25° C.) overnight. The ng and pmol amounts of the vector and library fragment used in the ligation reaction are shown in Table 13.

TABLE 13
Amounts of vector and library fragments used in ligation reactions

| Library | Amount | QHYA |
|---|---|---|
| Vector (5139 bp) | ng | 2000 |
| | pmol | 0.592 |
| Fragment (743 bp) | ng | 722.9 |
| | pmol | 1.479 |

[0706] d. Transformation

[0707] The ligation reactions were purified over PCR purification column (Qiagen) and electroporated into NEB 10-beta cells (New England Biolabs) at 2000 V in cuvettes with 0.1 cm gap. The cells were resuspended in SOC medium and incubated at 37° C. for 1 hr. Thirty mL of SuperBroth medium containing 20 μg/mL of carbenicillin and 20 mM of glucose were added to the culture and titrated on to LB agar plates containing 100 μg/mL of carbenicillin and 20 mM of glucose. The cells were incubated at 37° C. for 1 hr and added to 200 mL of SuperBroth medium with 50 μg/mL of carbenicillin and 20 mM of glucose. The culture was incubated overnight at 37° C. Maxiprep DNA was prepared from the overnight culture using HiSpeed Maxiprep Kit (Qiagen) according to the manufacturer's protocol.

[0708] The size of the QHYA library was 2.0×10⁸.

B. Randomization of 2G12 Light Chain CDR3 by Modified Fragment Assembly and Ligation/Single Primer Amplification (mFAL-SPA)

[0709] The Modified Fragment Assembly and Ligation (mFAL-SPA) method, as described in U.S. Application Publication No. 2010-0081575 also was employed to generate nucleic acid libraries which are diversified at the same four amino acid positions (A, G, Y, S), in the light chain CDR3 of 2G12 Fab. The details of this method are as follows and shown in FIG. 3.

[0710] 1. Generation of Pools of Randomized Duplexes

[0711] Six pools of randomized oligonucleotides (AGYS, SYGA, AGYS+1, SYGA+1, AGYS+2, and SGYA+2) were designed and generated for use in forming three pools of randomized duplexes (DO, DO+1, and DO+2) (see FIG. 3A). The sequences of these randomized oligonucleotides are set forth in Table 14, below. Each oligonucleotide in each of these randomized pools was synthesized based on a reference sequence (which contained part of the wild-type 2G 12 light chain CDR3 nucleotide sequence), but contained randomized portions, represented in underlined type in Table 14 for oligonucleotides AGYS, SYGA, AGYS+1, SYGA+1, AGYS+2, and SGYA+2. The region encoding the light chain CDR3 region in these oligonucleotides is represented in bold type. The randomized portions were synthesized using the NNK or NNT doping strategy as described above for the overlap PCR mutagenesis. The reference wild-type 2G12 sequence used to design the AGYS, SYGA, AGYS+1, SYGA+1, AGYS+2, and SGYA+2 pools of randomized oligonucleotides also is listed in Table 14. The region encoding the light chain CDR3 is indicated in bold.

[0712] The randomized oligonucleotides were designed such that each oligonucleotide in each of the pools contained a region complementary to an oligonucleotide in another pool. For example, oligonucleotides in pool AGYS were complementary to oligonucleotides in pool SYGA, oligonucleotides in pool AGYS+1 were complementary to oligonucleotides in pool SYGA+1, and oligonucleotides in pool AGYS+2 were complementary to oligonucleotides in pool SYGA+2. The oligonucleotides in each pool further were designed, whereby, following hybridization of the pairs of oligonucleotides through these complementary regions, two nucleotide 5′-end overhangs would be generated, to facilitate ligation in subsequent steps. The nucleotides that become the 5′-end overhangs are indicated in italics in Table 14 for oligonucleotides AGYS, SYGA, AGYS+1, SYGA+1, AGYS+2, and SGYA+2. The nucleotides in the randomized pools were labeled with 5′ phosphate groups.

TABLE 14
Primers for mFAL-SPA

| | | | SEQ |
|---|---|---|---|
| | | | ID |
| Name | nt | Sequences | NO |
| 2G12LCF | 41 | GCCGCTGTGCCATCGCTCAGTAACaattgaattaa | 13 |
| | | ggagga | |
| L1R | 34 | gggcggcgctcttcG [symbol] CGAAGTCGTCGAACTG | 24 |
| 2G12 | 55 | CTACCTACCACTGCCAGCACTACGCTGGTTACTCT | 15 |
| reference | | GCTACCTTCGGTCAGGGTAC | |
| sequence | | | |
| AGYS | 55 | [symbol] CCTACCACTGCCAGCACTATNNKNNKNNKNNK | 16 |
| | | GCTACCTTCGGTCAGGGTAC | |
| SYGA | 55 | [symbol] GTACCCTGACCGAAGGTAGCMNNMNNMNNMNN | 25 |
| | | ATAGTGCTGGCAGTGGTAGG | |
| AGYS+1 | 58 | [symbol] CCTACCACTGCCAGCACTATNNKNNKNNKNNK | 17 |
| | | NNKGCTACCTTCGGTCAGGGTAC | |
| SYGA+1 | 58 | [symbol] GTACCCTGACCGAAGGTAGCMNNMNNMNNMNN | 26 |
| | | MNNATAGTGCTGGCAGTGGTAGG | |
| AGYS+2 | 61 | [symbol] CCTACCACTGCCAGCACTATNNKNNKNNKNNK | 18 |
| | | NNKNNKGCTACCTTCGGTCAGGGTAC | |
| SYGA+2 | 61 | [symbol] GTACCCTGACCGAAGGTAGCMNNMNNMNNMNN | 27 |
| | | MNNMNNATAGTGCTGGCAGTGGTAGG | |
| L2F | 34 | gggcggcgctcttcC [symbol] TGTTGAAATCAAACGT | 28 |
| 2G12LCR | 48 | GCCGCTGTGCCATCGCTCAGTAACTTAATTAATTA | 19 |
| | | GCATTCACCACGG | |

The 2G12LCF, L1R and 2G12LCR primers were purified by HPLC. The AGYS, SYGA, AGYS+1, SYGA+1, AGYS+2, and SYGA+2 primers contain a 5′ phosphate.

[0713] In order to form the DO, DO+1, and DO+2 randomized duplexes, 50 μL oligonucleotide 1 (at 100 μM) and 50 μL oligonucleotide 2 (see Table 14) (100 μM) as set forth in Table 15 for each reaction were mixed with 1 μL of 5M NaCl. The mixture was denatured at 95° C. for 5 min and slowly cooled to ambient temperature (25° C.) on a heat block covered with a Styrofoam® box to allow duplex oligonucleotide (DO) formation.

TABLE 15
Oligonucleotide pairings for generation of randomized duplexes

| | DO | DO + 1 | DO + 2 |
|---|---|---|---|
| Oligonucleotide 1 | AGYS | AGYS + 1 | AGYS + 2 |
| Oligonucleotide 2 | SGYA | SGYA + 1 | SGYA + 2 |
| Size (bp) | 55 | 58 | 61 |

[0714] 2. Generation of Reference Sequence Duplexes by PCR

[0715] PCR amplification was carried out to generate two reference sequence duplexes (LC1 and LC2) (see FIG. 3B). Duplexes in pool 1 (LC1) were 385 nucleotides in length, and duplexes in pool 2 (LC2) were 387 nucleotides in length. For this process, two pools of forward oligonucleotide primers (2G12LCF and L2F) and two pools of reverse oligonucleotide primers (L1R and 2G12LCR) were synthesized. The sequences of the primers in each pool are set forth in Table 14, above.

[0716] Two of the primers, L1R and L2F, used to generate the reference sequence duplexes contained a 5′ sequence of nucleotides corresponding to a SapI restriction endonuclease cleavage site (GCTCTTC) (SEQ ID NO: 29). This enzyme cuts duplex polynucleotides to leave a 3-nucleotide overhang of any sequence at its 5′ end, beginning at one nucleotide in the 3′ direction from this recognition sequence. The restriction endonuclease recognition site is indicated in italics in Table 14, above, while the three-nucleotide overhang in each primer pool is indicated in bold. The oligonucleotides were designed such that the potential three nucleotide overhang of each primer pool was complementary to one of the three nucleotide overhangs generated in the randomized duplexes. The oligonucleotides were designed in this manner to facilitate ligation in a subsequent step.

[0717] Primers in the 2G12LCF pool contained a sequence of nucleotides corresponding to a MfeI restriction endonuclease recognition site. Primers in the 2G12LCR pool contained a sequence of nucleotides corresponding to a Pad restriction endonuclease site (the MfeI and Pad restriction sites are indicated in bold in Table 14). These restriction endonuclease recognition sites facilitated ligation of the assembled duplexes into vectors in subsequent steps.

[0718] Further, the forward primer pool 2G12LCF and the reverse primer pool 2G12LCR contained a non gene-specific sequence region that is identical to the CALX24 primer (SEQ ID NO:21) at the 5′ ends of the primers. Thus, the reference sequence duplexes LC1 and LC2, generated by PCR with these primers/oligonucleotides, contained a duplex of these regions at each end of the reference sequence duplex. These regions served as templates for the primer CALX24, which was used in the subsequent single primer amplification (SPA) step, described below.

[0719] To form duplexes using these primers, the 2G12 3Ala LC pCAL IT* vector was used as a template in three separate PCR amplifications. For these reactions, primer pair pools, 2G12LCF/L1R and L2F/2G12LCR, were used to amplify duplex pool LC1 and duplex pool LC2 (Table 16). For each reaction, 200 picomoles (pmol) of each primer (10 μL), 1 microgram (μg) of the 2G12 3Ala LC pCAL IT* vector template (10 μL of 100 ng/μL stock) were incubated in the presence of 10 μL Advantage HF2 Polymerase Mix (Clontech), 50 μL of 10c HF2 reaction buffer, 50 μL of 10×dNTP mixture, 360 μL PCR grade water in a 500 μL reaction volume. The PCR was carried out using the following reaction conditions: 1 minute denaturation at 95° C., followed by 20 cycles of 5 seconds of denaturation at 95° C., 10 seconds of annealing at 50° C., and 30 seconds of extension at 68° C., then finishing with a 1 minute incubation at 68° C. The amplified fragments were gel-purified using a Gel Extraction Kit (Qiagen) according to the manufacturer's instruction. The purified products were run on 1% agarose gel and each fragment was gel-purified with Gel Extraction Kit (Qiagen) according to the manufacturer's instruction.

TABLE 16
Primer pairs for duplex pools

| Fragment | LC1 | LC2 |
|---|---|---|
| 5′ primer | 2G12LCF | L2F |
| 3′ primer | L1R | 2G12LCR |
| Size (bp) | 385 | 387 |

[0720] After amplification by PCR, 20 pmoles of LC1 (385 bp) and LC2 (387 bp) were digested with SapI (New England Biolabs). The digested fragments were purified with PCR purification column (Qiagen) according to the manufacturer's instruction.

[0721] 3. Ligation of Digested Reference Sequence Duplexes and Randomized Duplexes to Form Intermediate Duplexes

[0722] The digested reference sequence duplexes and the randomized duplexes were hybridized and ligated to form intermediate duplexes (see FIG. 3D). This process was carried out as follows. Three ligation reactions, one for each randomized duplex (DO, DO+1, and DO+2), were prepared. Each randomized duplex (DO, DO+1, or DO+2) was mixed in equimolar amounts (5.19 picomoles) with both reference duplexes, LC1 and LC2, in the presence of 80 μL 5×T4 DNA ligase buffer and ligated with 20 units of T4 DNA Ligase in a 400 μL volume, at room temperature (˜25° C.) overnight. The reaction was purified with PCR purification column and run on 1% agarose gel and each fragment was gel purified (Qiagen) according to the manufacturer's instruction.

[0723] 4. Formation of Duplex Cassettes by Single Primer Amplification

[0724] Following the formation of the intermediate duplexes, a single primer amplification (SPA) reaction was used to generate amplified randomized assembled duplexes (see FIG. 3D). Amplification was carried out using 140 μL of the intermediate duplex (LC1/DO/LC2, LC1/DO+1/LC2, or LC1/DO+2/LC2) and 6 μL CALX24 primer (100 μmol), in the presence of 10 μL Advantage HF2 Polymerase Mix, 50 μl, 10×HF2 buffer, 50 μL 10×dNTP, 244 μI, of PCR grade water in a 500 μL reaction volume. The PCR was carried out using the following reaction conditions: denaturation at 95° C. for 1 min, followed by 20 cycles of denaturation at 95° C. for 5 seconds, annealing and extension at 68° C. for 1 min, then finished with an incubation at 68° C. for 3 min.

[0725] The resulting collections of amplified assembled duplexes were column purified with a PCR purification column (Qiagen) and run on 1% agarose gel and purified with Gel Extraction Kit (Qiagen) according to the manufacturer's instruction. Each duplex cassette LC 1/DO/LC2, LC1/DO+1/LC2, and LC1/DO+2/LC2 represents the AGYS, AGYS+1 and AGYS+2 libraries, respectively.

[0726] 5. Formation of the Variant 2G12 Nucleic Acid Libraries

[0727] Five μg of each library (AGYS, AGYS+1 or AGYS+2) was digested with MfeI and PacI restriction enzymes and purified over a PCR purification column (Qiagen), according to the manufacturer's instruction. The vector DNA, 2G12 3Ala LC pCAL IT* (60 μg), also was digested with MfeI and Pad, run on a 0.7% agarose gel, and the 5139 bp vector fragment was purified using Gel Extraction Kit (Qiagen). Each vector was ligated with the assembled duplex cassettes described above, to generate three libraries, each containing randomized 2G12 Fab encoding nucleic acid members.

[0728] The MfeI/PacI digested vector and library fragments were ligated in the presence of 10 μL T4 DNA ligase (10 units) (Invitrogen) and 5× ligation reaction buffer (Invitrogen) in a 200 μL reaction volume at ambient temperature (22-25° C.) overnight. The ng and pmol amounts of the vector and library fragments used in the ligation reactions is shown in Table 17.

TABLE 17
Amounts of vector and library fragments used in ligation reactions

| Library | Amount | AGYS | AGYS + 1 | AGYS + 2 |
|---|---|---|---|---|
| Vector | ng | 1066.77 | 1066.77 | 8139.06 |
| | pmol | 0.316 | 0.315 | 2.405 |
| Fragment | ng | 385.58 | 387.142 | 2965.63 |
| | pmol | 0.789 | 0.790 | 6.026 |

[0729] 6. Transformation

[0730] The ligation reactions were purified over PCR purification column (Qiagen) and electroporated into NEB 10-beta cells (New England Biolabs) at 2000 V in cuvettes with 0.1 cm gap. The cells were resuspended in SOC medium and incubated at 37° C. for 1 hr. Thirty mL of SuperBroth medium containing 20 μg/mL of carbenicillin and 20 mM of glucose were added to the culture and titrated on to LB agar plates containing 100 μg/mL of carbenicillin and 20 mM of glucose. The cells were incubated at 37° C. for 1 hr and added to 200 mL of SuperBroth medium with 50 μg/mL of carbenicillin and 20 mM of glucose. The culture was incubated overnight at 37° C. Maxiprep DNA was prepared from the overnight culture using HiSpeed Maxiprep Kit (Qiagen) according to the manufacturer's protocol.

[0731] The size of each library was 3.15×10⁸ for AGYS, 3.98×10⁸ for AGYS+1, and 1.59×10⁹ for AGYS+2.

### Example 3

### Preparation of Formalin-Fixed Candida albicans Cells

[0732] Formalin fixed C. albicans cells were prepared for use as the C. albicans target antigen for phage selection. A starter culture was first prepared by inoculation of 10 mL of YPD medium with a single colony of C. albicans (Cat. No. 10231, ATCC, stored at −20° C.). The cells were cultured at 37° C. with shaking at 170 rpm for 24 hours, before 500 μL of culture was removed and transferred into 10 mL of fresh YPD medium. This was repeated to generate 10 individual cultures, which were incubated at 37° C. with agitation at 170 rpm for 24 hours. The C. albicans cells were centrifuged at 4000 rpm for 10 minutes and the cell pellet was resuspended in 1×PBS. This washing step was repeated twice before the cell pellet was fixed in 1% formalin (diluted in 1×PBS). The cells were incubated with shaking for 30 minutes at room temperature before being centrifuged at 4000 rpm for 10 minutes. The cell pellet was resuspended in 1×PBS. The cells were washed twice more with PBS before being counted using a hemocytometer. The C. albicans cell density was adjusted to 1×10⁸ cells per mL, and the cells were aliquotted into 1 mL stocks and stored at −20° C. or −80° C. The fixed C. albicans cells were thawed on ice prior to use before each round of selection.

### Example 4

### Selection of Domain-Exchanged Antibodies Specific for Candida albicans

[0733] Diversified 2G12-derived domain-exchanged antibodies having specificity for Candida albicans were selected using phage display techniques. Each 2G12 library generated as described in Example 2 was introduced into electrocompetent DH5α VCSM13 dsDNA CL F-cells for expression on the surface of the cells in phagemids. The phage were then screened for specificity for C. albicans using formalin-fixed C. albicans cells as the target antigen. The selection protocol is described in general below.

A. Preparation of Electrocompetent DH5α VCSM13 dsDNA CL F-Cells

[0734] To generate the electrocompetent DH5α VCSM13 dsDNA CL F-cells for subsequent use in the display of phage, double-stranded DNA from VCSM 13 helper phage was purified before being transformed into DH5α cells. These cells were then treated to become electrocompetent.

[0735] 1. Purification of VCSM13 Helper Phage dsDNA

[0736] Double-stranded DNA from VCSM13 helper phage was purified using the Qiafilter Midiprep or Maxiprep Kit (Qiagen), per the manufacturer's instructions. Briefly, a colony of XL1-Blue MRF′ cells (Stratagene) was transferred into 10 ml of Superbroth (SB) media (30 g Bacto tryptone, 20 g Yeast extract, 10 g MOPS, in 1 liter water, pH 7.0) in a 50-ml conical tube. Tetracycline was added to a final concentration of 10 μg/mL, and the culture was incubated with shaking at 37° C. until an OD600 of 0.3 was reached (corresponding approximately to 2.5×10⁸ cells/mL). The culture was scaled up to between 50 and 100 mL, tetracycline was added to a final concentration of 10 μg/mL. For culture volumes of approximately 50-100 mL, the Qiagen Qiafilter Midiprep was used for purification. For culture volumes of approximately 200 mL, the Qiagen Qiafilter Maxiprep was used for purification.

[0737] VCSM13 helper phage (Stratagene) were added to the culture at a multiplicity of infection (MOI) of 10:1 (phage-to-cells ratio). The culture was incubates at 37° C. (without agitation) for 15 minutes to allow the phage to attach to the cells, before being incubated for a further hour with shaking at 37° C. Kanamycin was added to the culture at a final concentration of 25 μg/mL, and the culture was incubated with shaking at 37° C. for a further 8 hours. The cell debris was pelleted by centrifugation and the supernatant was transferred to a fresh conical tube. The pellet was stored at either −20° C. or −80° C. until required. The titer of the supernatant was determined and typically found to be between 7.5×10¹⁰ and 1×10¹² pfu/mL.

[0738] The cell pellet was resuspended in 4 mL of Buffer P1 if a Midiprep was being used for purification, or 10 mL of Buffer P1 if a Maxiprep was being used for purification. The DNA was purified as per the manufacturer's instructions. Following elution from the Qiagen-tip 100 (if a Midiprep kit was used) or Qiagen-tip 500 (if a Maxiprep kit was used), the VCSM13 DNA was precipitated by the addition of 0.7 volumes of room temperature isopropanol and centrifugation at >15,000×g for 60 minutes at 4° C. The DNA pellets were washed with 2 mL or 5 mL (for Midiprep or Maxiprep purifications, respectively) of 70% ethanol and centrifuged at >15,000×g for 10 minutes at 4° C. The VCSM13 DNA pellet was air dried for 5-10 minutes and dissolved in a suitable volume of TE buffer, pH 8.0, or 10 nM Tris-Cl, pH 8.5. The concentration of VCSM13 DNA was then measured.

[0739] 2. Preparation of Electrocompetent VCSM13 DH5α Cell Line

[0740] To prepare the electrocompetent VCSM13 DH5α cell line, sterile SOC was first pre-heated to 37° C. and the electroporator settings were adjusted to: 2000V [20 kV/cm field strength], resistance to 200Ω, capacitance to 25 μF. Electroporation cuvettes (0.1 centimeter gap) were pre-chilled at −20° C. and transferred to an ice bucket prior to use. Electrocompetent ElectroMax DH5α-E cells (Invitrogen) were thawed on ice before 100 ng of the purified VCSM13 DNA was added to the cells. The cells were then incubated for 5 minutes on ice and transferred from the 1.5 mL tube into each pre-chilled electroporation cuvette. To avoid arcing and to ensure optimal DNA entry, a 2-5% volume of DNA to cell ratio typically was used. The electroporation cuvettes were tapped gently until the mixture of cells and DNA settled flush with the bottom of the cuvette, and any external water or condensation on the cuvette was wiped away. The sample was pulsed once and the cuvette was quickly removed and 1000 μl of pre-warmed SOC media was added to the cells.

[0741] The cells were then transferred to a sterile 50 mL conical polypropylene tube, and the remaining cells in the cuvette were flushed twice more with 1 mL, so that the cells were resuspended in a final volume of 3 mL SOC media. Superbroth media was added to the cells for a final volume of 10 mL, and the cells were incubated at 37° C. with shaking at 250 rpm, for 1 hour. (To calculate the transformation efficiency, 90 μl of SOC was aliquotted into an ELISA dilution plate, and 10 μL of the cells (DH5α cells with VCSM13 DNA) was added to the top well and a 6 step, 10-fold dilution series was prepared. Seventy-five μL of the diluted cells were plated on LB agar/kanamycin plates (LB agar with 25 μg/mL kanamycin and 20 mM D-glucose), and the liquid was allowed to dry for a minimum of 15 minutes before being incubated at 37° C. overnight).

[0742] After the 1 hour incubation, 0.5 mL of the DH5α VCSM13 dsDNA CL F-cells were inoculated into a 500 mL flask containing 50 mL of SB media, and kanamycin was added to a final concentration of 25 μg/mL. The flask was incubated at 37° C. overnight with shaking at 250 rpm. Ten mL of the overnight culture was added to 1 L of SB in a 2 L flask, and kanamycin was added to a final concentration of 25 μg/mL. The cells were grown at 37° C. with shaking at 250 rpm until the culture reached an OD 600 of approximately 0.6-0.7, so that the cells were harvested at early to mid-log phase (cell density of approximately 4-5×10⁷ cells/mL). The cells were chilled on ice for approximately 20 minutes, and kept in an ice/water bath for the subsequent steps. All containers used in the subsequent steps also were chilled before adding any cells.

[0743] The DH5α VCSM13 dsDNA CL F-cells were transferred to three large centrifuge bottles and centrifuged at 4000×g for 20 min at 4° C. The supernatant was decanted and the cells remaining in the bottle were placed on ice. The cell pellets were then resuspended in 10 mL of ice cold 10% glycerol, and the bottles were then filled with approximately 400 mL of ice cold 10% glycerol. The cells were again centrifuged at 4000×g for 20 min at 4° C., the supernatant was decanted, and the cells remaining in the bottle were placed on ice. The cell pellets were resuspended in 10 mL of ice cold 10% glycerol, and another approximately 400 mL 10% glycerol was added to fill the bottle before the cells were again centrifuged at 4000×g for 20 min at 4° C. The supernatant was removed and the cells were resuspended in approximately 25 mL ice cold 10% glycerol and transferred to a pre-chilled 50 mL falcon tube. The cells were pelleted by centrifugation at 4000 rpm for 30 minutes and the supernatant was carefully removed. The final cell pellet was resuspended in 4-5 mL ice cold 10% glycerol, having a concentration of about 1−3×10¹° cells/mL. The resulting electrocompetent DH5α VCSM13 dsDNA CL F-cells were aliquotted in 100 μL volumes into several pre-chilled sterile 1.5 mL tubes, on ice, before being frozen in a dry ice/ethanol bath or in liquid nitrogen and stored at −80° C.

B. Phage Display and Selection of Domain-Exchanged Antibodies Specific for C. albicans.

[0744] 1. Electroporation of 2G12 Library DNA into DH5α VCSM13 dsDNA CL F-Cells and Library Expansion.

[0745] The six libraries generated in Example 2 were individually electroporated and screened. For electroporation of 2G12 library DNA into electrocompetent DH5α VCSM13 dsDNA CL F-cells, the electroporator settings were adjusted as follows: 2000V (20 kV/cm field strength), resistance to 200Ω, and capacitance to 25 The electroporation cuvettes (0.1 centimeter gap) were pre-chilled at −20° C. and transferred to an ice bucket until use. Electrocompetent DH5α VCSM13 dsDNA CL F-cells (prepared as described in Example 9.A.1, above) were thawed on ice. Pre-chilled 2G12 library DNA was then added to the cells and incubated on ice for 5 minutes. Typically, 100 ng of library DNA in 2-5 μL was added to 100 μL of cells. The volume of cells and amount of DNA added was dependent upon the scale of the electroporation. For a mini electroporation, 100-500 ng DNA was added to 100-500 μl, cells, which resulting in approximately 1×10⁸ to 1×10⁹ cfu. For a midi electroporation, 500-1000 ng DNA was added to 500-1000 μL cells, resulting in approximately 1×10⁹ to 1×10¹⁰ cfu. For a maxi electroporation, 1500-3000 ng DNA was added to 1500-3000 μL cells, resulting in greater that 1×10¹⁰ cfu. One hundred μL of the cells, premixed with the library DNA, was then added to each electroporation cuvette, which was tapped gently until the cell mixture settled flush with the bottom of the cuvette. Thus, for a mini electroporation, there were 1-5 cuvettes; for a midi electroporation, there were 5-10 cuvettes; and for a maxi electroporation, there were 15-30 cuvettes. Any external water or condensation on the cuvette was removed before the samples were pulsed once.

[0746] The cuvettes were removed and 1000 μl of prewarmed (37° C.) SOC media was added to resuspend and quench the cells. The cells were transferred to a sterile 50 mL conical polypropylene tube, and the SOC flush process was repeated two more times, resulting in 3 mL of cells from each electroporation cuvette. 2YT medium (containing 16 g Bacto tryptone, 10 g Yeast extract and 5 g NaCl per liter) was added to the cells in each tube to a final volume of 10 mL per tube. Sterile glucose was then added to a final concentration of 20 mM. The cells were incubated at 37° C. with shaking at 250 rpm for 1 hour. (To calculate the transformation efficiency, 90 al of SOC was aliquoted into an ELISA dilution plate, and 10 μl, of the cells (DH5α VCSM13 dsDNA CL F-cells with library DNA) was added to the top well and a 6 step, 10-fold dilution series was prepared. Seventy-five μL of the diluted cells were plated on LB agar/carbenicillin plates (LB agar with 100 μg/mL carbenicillin and 20 mM D-glucose), and the liquid was allowed to dry for a minimum of 15 minutes before being incubated at 37° C. overnight).

[0747] Following the 1 hour incubation, the cells were transferred to a 100 mL bottle and 2YT media was added to a final volume of 50 mL before kanamycin (final concentration of 25 μg/mL) and carbenicillin (final concentration of 50 μg/mL) also were added for library expansion. For every 100 nanograms of library DNA electroporated (i.e. for every electroporation cuvette), a separate culture bottle with 50 mL 2YT final volume was used (i.e. for a mini electroporation, there was 1−5×50 mL 2YT; for a midi electroporation, there was 5−10×50 mL 2YT; and for a maxi electroporation, there was 15−30×50 mL 2YT). The library was then expanded by incubation of the cells at 37° C. with shaking at 250 rpm for 2 hours.

[0748] 2. Phagemid Expression

[0749] Following the library expansion, the cell suspension was centrifuged at room temperature for 25 minutes at 4000 rpm and the cell pellet was resuspended in 2YT media to a final volume of such that the OD595 of the bacterial culture was 0.3. Kanamycin was added to a final concentration of 25 μg/mL, carbenicillin was added to a final concentration of 50 μg/mL, and IPTG was added to a final concentration of 1 mM (for variations of the protocol in which pCAL libraries rather than pCAL IT* libraries are used, IPTG is not added). The cells were incubated at 30° C., 300 rpm for 9 hours, then incubated at 4° C. with shaking at 200 rpm until needed.

[0750] 3. Phage Precipitation and Preparation for Capture

[0751] To precipitate the phage, the cultures bottles containing the expressed phage were removed from the 4° C. incubator and centrifuged at 4000 rpm for 30 minutes. Thirty-two mL of the supernatant was transferred to a 50 mL Nalgene centrifuge tube and 8 mL of 20% PEG with 2.5M NaCl was added (a ratio of 4:1 supernatant: 20% PEG with 2.5M NaCl). The tube was inverted 10 times before being incubated on ice for 30 minutes. The centrifuge tube was spun at 13,000 rpm for 30 minutes at 4° C., and the supernatant was pour off. The tube was inverted on a paper towel for 5-10 minutes to remove any excess media. The phage pellet on the bottom of the tube was carefully resuspended (without any bubbles forming) in 1000 μL 1×PBS if a mini electroporation was originally performed, 3750 μL 1×PBS if a midi electroporation was originally performed, or 10000 μL 1×PBS if a maxi electroporation was originally performed. The resuspended phage were transferred to an appropriate number of sterile 1.5 mL microcentrifuge tubes, which were centrifuged at 13,500 rpm, at 25° C. for 5 minutes to pellet cell debris. Finally, supernatant containing the resuspended phage was mixed at a 1:1 ratio with 8% nonfat dry milk (NFDM; reconstituted in 1×PBS) for a final concentration of 4% NFDM. Any unused supernatant was transferred to a sterile 1.5 mL microcentrifuge tube.

[0752] 4. Phage Capture

[0753] An appropriate amount of phage (1000 μL for a mini scale selection; 5000 μL for a midi scale selection; 15000 μL for a maxi scale selection), was added to an 1.5 mL tube or 50 mL conical tube (depending on the scale of selection). The phage were then mixed with Tween20 to a final concentration of 0.05% Tween20, and 1×10⁸ formalin-fixed C. albicans cells. The mixture was then incubated with rocking for 2 hours at 37° C. The C. albicans cells were washed by centrifugation at 4000 rpm for 5 minutes, removal of the supernatant, and resuspension in 1500 μL, 5000 μL or 15000 μL PBS/0.05% Tween20 (for mini, midi and maxi scale selections, respectively). The washing procedure was repeated four times for a total of 5 washes.

[0754] 5. Phage Elution

[0755] To elute the phage, 150 μL, 500 μL or 1000 μL of 0.1M glycine, pH 2.2 (for a mini, midi or maxi scale selection, respectively), was added to the cells and incubated for 10 minutes at room temperature. The tube was vortexed repeatedly to ensure complete elution of all of the phage. After centrifugation to pellet the cells, the glycine containing the eluted phage was transferred to a sterile 1.5 mL tube and was neutralized with the addition of 15 μL, 50 μL or 100 μL of 2M Tris base, pH 9.0 (for a mini, midi or maxi scale selection, respectively).

[0756] The phage were then used to infect 2.5 mL, 7.5 mL or 15 mL (for a mini, midi or maxi scale selection, respectively) of XL1-Blue MRF′ cells (OD600 of 0.6-1.5).

[0757] The cells were incubated for 30 minutes at room temperature. The cells were spread on a Corning bioassay tray (LB agar containing 100 μg/mL carbenicillin, 100 mM D-glucose), with 2.5 mL cells per tray. The tray was incubated at room temperature for 30 minutes before being incubated at 37° C. for 12 hours.

[0758] 6. DNA Purification and Further Rounds of Selection

[0759] After the 12 hour incubation, the cells were scraped from the tray and DNA was purified using a Qiagen DNA purification kit according to the manufacturers instructions. Additional rounds of selection were then performed by electroporating the purified DNA into the electrocompetent DH5α VCSM13 dsDNA CL F-cells, and proceeding with the phage expression, precipitation, capture and elution, as described above. To wash the phage-bound cells (from Example 4.B.4, above) in the subsequent selection rounds, the following wash conditions were used: Round 2: 5 washes as described for the first round; Round 3; 10 washes with vigorous vortexing and pipetting the cells up and down; Rounds 4-8; 10 washes with vigorous vortexing and pipetting the cells up and down, including a 5 minute incubation at room temperature with rocking between each wash.

### Summary of Library Screening

[0760] Table 18 below summarizes the screening for the various CDRL3 libraries generated in Example 2A above. The AGYS and QHYA libraries, which were generated separately, were screened together, with a total of 5 rounds of panning performed. The AGYS+1 and AGYS+2 libraries were screened separately, with a total of 6 rounds of panning performed. 400 clones each from the last two rounds of panning for each screened library were tested for binding to C. albicans using ELISA as described in Example 5 below.

TABLE 18
Library Screening Summary

| | Overlap PCR Libraries | | |
|---|---|---|---|
| Library | AGYS/QHYA | AGYS + 1 | AGYS + 2 |
| # Rounds | 5 | 6 | 6 |
| Clones Tested | 400 from | 400 from | 400 from |
| by ELISA | round 4 | round 5 | round 5 |
| Clones Tested | 400 from | 400 from | 400 from |
| by ELISA | round 5 | round 6 | round 6 |

### Example 5

### Preparation of Candida albicans and Control Antigen for ELISA Screening of Fabs

[0761] C. albicans cells were prepared for use as the C. albicans target antigen for ELSA screening of the Fab polyclonal pre-selected library isolated in the phage display screening described in Example 4. A starter culture was first prepared by inoculation of 10 mL of YPD medium with a single colony of C. albicans (Cat. No. 10231, ATCC). The cells were cultured at 37° C. with shaking at 170 rpm for 24 hours, before 500 μl, of culture was removed and transferred into 10 mL of fresh YPD medium. The culture was then diluted 1:3 in YPD medium and plated at 100 μL per well of the ELISA microplate (Reacti-Bind White Opaque 96-well plate). The plate was sealed with Qiagen tape pad and incubated at 37° C. for 8-16 hours. Following incubation, the plate was washed 5 times with PBS with 0.05% Tween20. Finally, the ELISA plate was blocked with 250 μl, of 4% NFDM-PBS at 37° C. for 2 hours and then used in the ELISA assay described in Example 6.

[0762] ELISA plates containing chicken albumin or goat anti-human Fab were also prepared for negative controls. 100 ng of chicken albumin or goat anti-human Fab (100 μL, diluted in PBS) was added to each well of an ELISA microplate (Reacti-Bind White Opaque 96-well plate). The ELISA plate was incubated overnight with rocking at 4° C. Following incubation, the plate was washed 5 times with PBS with 0.05% Tween20. Finally, the ELISA plate was blocked with 250 μL of 4% NFDM-PBS at 37° C. for 2 hours and then used in the ELISA assay described in Example 6.

### Example 6

### ELISA Screening of Fab Candidates for Binding to Candida albicans

[0763] The polyclonal library DNA that was pre-selected by phage display in Example 4 was then further screened for identification of single Fab clones that bind to C. albicans. A summary of the number of clones and the round from which they were selected for the various libraries that were screened in Example 4 is shown in Table 18 above. One nanogram of library DNA prepared using a Qiagen Qiafilter according to the manufacturer's instructions was transformed into electrocompetent DH5 Alpha E (F-) cells (Invitrogen). The transformed cells were plated onto LB agar plates containing 100 μg/mL carbenicillin and 100 mM glucose to obtain single colonies. The culture plates were inverted and incubated at 37° C. for 14-16 hours.

[0764] Individual colonies were then inoculated into a 96 deep well (1 mL volume) parental microplate containing 1.2 mL SB media containing 50 μg/ml carbenicillin and 20 mM glucose. The parental plate was incubated at 37° C. with shaking at 300 rpm for 12-14 hours.

[0765] Following incubation of the parental microplate cultures, a 96 deep well daughter microplate was prepared with 1.0 mL SB culture containing 50 μg/ml carbenicillin and 1 mM IPTG. 200 μA of supernatant from the parental plate was transferred to the daughter plate. The parental plate was centrifuged at 4000 rpm for 20 minutes, and the supernatant was discarded. The parental plate was stored at −80° C. The parental plate was saved for later preparation of DNA and sequence analysis after clonal target antigen recognition to C. albicans was determined. For induction of antibody expression, the daughter plate was incubated at 30° C. with shaking at 300 rpm for 8 hours. The daughter plate was were then stored at −80° C., overnight.

[0766] The following day, the daughter plate was removed from −80° C. storage and subjected to three freeze/thaw cycles of 37° C. water bath for 5 minutes, followed by incubation in a dry ice ethanol bath for 5 minutes to lyse the cells. The microplate then was spun at 4000 rpm in the tabletop centrifuge for 30 minutes to clear the lysate. The soluble, freeze thawed antibodies (supernatants) from the daughter plate were then diluted 1:1 with 8% NFDM-1×PBS+0.1% Tween20 buffer into a 96 well dilution plate.

[0767] ELISA plates were coated with C. albicans, chicken albumin and goat anti-human Fab as described above in Example 4. The 4% NFDM-PBS blocking solution was discarded and the ELISA plates were washed two times with 1×PBS+0.05% Tween20 wash buffer. 100 μl of the diluted antibodies from the daughter plate was transferred from the 96 well dilution plate to the ELISA plates containing the C. albicans, chicken albumin and goat anti-human Fab. Dilutions of the 2G12 IgG antibody were employed as a positive control. For the negative control, several wells received no primary antibody. The ELISA plates were then incubated at 37° C. for 1 hour with rocking. Following antibody incubation, the media from the ELISA plate wells was discarded to remove unbound antibody and the plates were washed 10 times with 1×PBS+0.05% Tween20 wash buffer.

[0768] For detection of Fab antibody binding, an anti-human Fab secondary antibody (Goat Anti Human Fab Min X (Pierce, 31414)) was employed. 100 μl of the diluted secondary antibody (1:50,000, diluted according to manufacturers instructions, using 4% NFDM-1×PBS+0.05% Tween20 as dilution buffer) was added to each well of the ELISA plates. The ELISA plates were then incubated at 37° C. for 1 hour with rocking. Following incubation, the secondary antibody solution was discarded to remove unbound antibody and the ELISA plates were washed 5 times with 1×PBS+0.05% Tween20 wash buffer. 50 μl of Supersignal ELISA Femtomax Sensitivity Substrate solution was added to each ELISA plate well. The ELISA plates were then read by measuring luminescence (relative light units (RLU)) using a Biotek Synergy2 luminometer. Positive hits were identified as wells that had greater than 10 times the relative light units (RLU) over background. Clones with RLU values less than 10 times over background and were not selected for follow up. Background was calculated by averaging the values from control wells without primary antibody.

[0769] Antibody 2G12 was diluted from concentrations of 0.0001 to 25 p.g/mL and tested for binding to goat anti-Human Fab to generate a standard curve. Using linear regression analysis obtained from the standard curve, estimated working concentrations of the antibody lysates were calculated and values were expressed in nanograms per mL. Specific binding of clones to C. albicans was normalized for antibody expression (RLU) per nanogram of antibody.

[0770] DNA from positive clones identified in the screen was prepared using the stored parental plates and sequence analysis was performed. Sequencing was performed for both the heavy and light chains of positive clones. A summary of the clones identified in the screen are shown in Tables 19a and 19b. The approximate affinities (in μg/mL) for selected Fabs are set forth in Table 20a below. Affinity can be converted to molar affinity based on the average molecular weight of a Fab (−50 kDa). Therefore, the affinity is approximately 20 nM for antibody A4F10, 30 nM for antibody A1G7, 40 nM for antibody P2H 12, and 180 nM for antibodies 1H12 and 4F8. The relative light unit value of selected antibodies evaluated in the luminescent C. albicans ELISA binding assay and the mean FITC fluorescence value of selected antibodies evaluated in the C. albicans FACS binding assay are set forth in Table 20b. Of these clones, 10 were selected for further study (see Table 22 below).

TABLE 19a
AGYS CDRL3 Mutants Identified by ELISA as binding to C. Albicans

| | K--- | R--- | M--- | Q--- | V/S--- | I/L--- | E/H--- |
|---|---|---|---|---|---|---|---|
| -EWR | QHYKEWRAT | QHYREWRAT | | | | | |
| | (SEQ ID | (SEQ ID | | | | | |
| | NO: 30) | NO: 218) | | | | | |
| -EWS | QHYKEWSAT | QHYREWRAT | | | | | |
| | (SEQ ID | (SEQ ID | | | | | |
| | NO: 31) | NO: 32) | | | | | |
| -EWW | QHYKEWWAT | QHYREWWAT | | | | | |
| | (SEQ ID | (SEQ ID | | | | | |
| | NO: 34) | NO: 35) | | | | | |
| -EWH | | QHYREWHAT | | | | | |
| | | (SEQ ID | | | | | |
| | | NO: 680) | | | | | |
| -EFN | | QHYREFNAT | | | | | |
| | | (SEQ ID | | | | | |
| | | NO: 219) | | | | | |
| -EFH | | QHYREFHAT | | | | | |
| | | (SEQ ID | | | | | |
| | | NO: 220) | | | | | |
| -SYN | | | | | | QHYLSYNAT | |
| | | | | | | (SEQ ID | |
| | | | | | | NO: 681) | |
| -SWS | | | | | | QHYLSWSAT | |
| | | | | | | (SEQ ID | |
| | | | | | | NO: 36) | |
| -AWS | | | | | | QHYLAWSAT | |
| | | | | | | (SEQ ID | |
| | | | | | | NO: 33) | |
| -PFN | QHYKPFNAT | QHYRPFNAT | QHYMPFNAT | QHYQPFNAT | | QHYLPFNAT | QHYEPFNAT |
| | (SEQ ID | (SEQ ID | (SEQ ID | (SEQ ID | | (SEQ ID | (SEQ ID |
| | NO: 37) | NO: 38) | NO: 39) | NO: 40) | | NO: 41) | NO: 42) |
| | | | QHYMPFNAS | | | | |
| | | | (SEQ ID | | | | |
| | | | NO: 222) | | | | |
| -PFE | QHYKPFEAT | QHYRPFEAT | | | | QHYIPFEAT | |
| | (SEQ ID | (SEQ ID | | | | (SEQ ID | |
| | NO: 43) | NO: 44) | | | | NO: 223) | |
| -PFQ | QHYKPFQAT | QHYRPFQAT | | QHYQPFQAT | | QHYIPFQAT | |
| | (SEQ ID | (SEQ ID | | (SEQ ID | | (SEQ ID | |
| | NO: 45) | NO: 46) | | NO: 47) | | NO: 48) | |
| | QHYKPFSAS | | | | | QHYLPFQAT | |
| | (SEQ ID | | | | | (SEQ ID | |
| | NO: 49) | | | | | NO: 224) | |
| -PFS | QHYKPFSAT | QHYRPFSAT | | QHYQPFSAT | QHYVPFSAT | QHYIPFSAT | QHYHPFSAT |
| | (SEQ ID | (SEQ ID | | (SEQ ID | (SEQ ID | (SEQ ID | (SEQ ID |
| | NO: 280) | NO: 50) | | NO: 51) | NO: 52) | NO: 225) | NO: 53) |
| -PFH | QHYKPFHAT | QHYRPFHAT | QHYMPFHAT | QHYQPFHAT | | | QHYEPFHAT |
| | (SEQ ID | (SEQ ID | (SEQ ID | (SEQ ID | | | (SEQ ID |
| | NO: 54) | NO: 55) | NO: 56) | NO: 226) | | | NO: 57) |
| -PFR | QHYKPFRAT | | QHYMPFRAT | QHYQPFRAT | QHYVPFRAT | | QHYEPFRAT |
| | (SEQ ID | | (SEQ ID | (SEQ ID | (SEQ ID | | (SEQ ID |
| | NO: 58) | | NO: 281) | NO: 227) | NO: 59) | | NO: 60) |
| -PFA | QHYKPFAAT | | | | QHYVPFAAT | QHYIPFAAT | |
| | (SEQ ID | | | | (SEQ ID | (SEQ ID | |
| | NO: 61) | | | | NO: 62) | NO: 63) | |
| -PFD | QHYKPFDAT | | QHYMPFDAT | QHYQPFDAT | | | |
| | (SEQ ID | | (SEQ ID | (SEQ ID | | | |
| | NO: 64) | | NO: 65) | NO: 679) | | | |
| -PFK | | | QHYMPFKAT | QHYQPFKAT | QHYVPFKAT | QHYLPFKAT | |
| | | | (SEQ ID | (SEQ ID | (SEQ ID | (SEQ ID | |
| | | | NO: 66) | NO: 682) | NO: 228) | NO: 229) | |
| -PFT | | | QHYMPFTAT | | | | |
| | | | (SEQ ID | | | | |
| | | | NO: 67) | | | | |
| -PFP | | | QHYMPFPAT | | | | |
| | | | (SEQ ID | | | | |
| | | | NO: 68) | | | | |
| -PFW | QHYKPFWAT | | | QHYQPFWAT | QHYSPFWAT | | |
| | (SEQ ID | | | (SEQ ID | (SEQ ID | | |
| | NO: 230) | | | NO: 69) | NO: 70) | | |
| -PFV | | | | QHYQPFVAT | | | |
| | | | | (SEQ ID | | | |
| | | | | NO: 231) | | | |
| -PFG | | | | | | QHYLPFGAS | |
| | | | | | | (SEQ ID | |
| | | | | | | NO: 244) | |
| -PFM | QHYKPFMAT | | | | | | |
| | (SEQ ID | | | | | | |
| | NO: 687) | | | | | | |
| -PWS | | QHYRPWSAT | | | | | |
| | | (SEQ ID | | | | | |
| | | NO: 221) | | | | | |
| -PWW | | QHYRPWWAT | | | | QHYLPWWAT | |
| | | (SEQ ID | | | | (SEQ ID | |
| | | NO: 232) | | | | NO: 233) | |
| -PYR | QHYKPYRAT | | QHYMPYRAT | QHYQPYRAT | | QHYLPYRAT | QHYEPYRAT |
| | (SEQ ID | | (SEQ ID | (SEQ ID | | (SEQ ID | (SEQ ID |
| | NO: 72) | | NO: 73) | NO: 74) | | NO: 75) | NO: 76) |
| | | | QHYMPYRAS | | | | |
| | | | (SEQ ID | | | | |
| | | | NO: 71) | | | | |
| -PYD | QHYKPYDAT | | | | | | |
| | (SEQ ID | | | | | | |
| | NO: 77) | | | | | | |
| -PYS | QHYKPYSAT | | QHYMPYSAT | QHYQPYSAT | | | |
| | (SEQ ID | | (SEQ ID | (SEQ ID | | | |
| | NO: 78) | | NO: 234) | NO: 235) | | | |
| -PYV | | | | QHYQPYVAT | | | QHYEPYVAT |
| | | | | (SEQ ID | | | (SEQ ID |
| | | | | NO: 79) | | | NO: 236) |
| -PYK | | | QHYMPYKAT | | | | QHYEPYKAT |
| | | | (SEQ ID | | | | (SEQ ID |
| | | | NO: 237) | | | | NO: 80) |
| -PYQ | | | | | | QHYLPYQAS | |
| | | | | | | (SEQ ID | |
| | | | | | | NO: 81) | |
| -PYN | | | QHYMPYNAT | QHYQPYNAT | | QHYLPYNAS | |
| | | | (SEQ ID | (SEQ ID | | (SEQ ID | |
| | | | NO: 238) | NO: 239) | | NO: 240) | |
| -PYW | | | | | QHYSPYWAT | | |
| | | | | | (SEQ ID | | |
| | | | | | NO: 241) | | |
| -PYE | | | | | | QHYLPYEAS | |
| | | | | | | (SEQ ID | |
| | | | | | | NO: 242) | |
| -PYL | | | | | | | QHYEPYLAT |
| | | | | | | | (SEQ ID |
| | | | | | | | NO: 243) |
| -DFS | QHYKDFSAT | | | | | | |
| | (SEQ ID | | | | | | |
| | NO: 245) | | | | | | |
| -AYQ | | | QHYMAYQAT | | | | |
| | | | (SEQ ID | | | | |
| | | | NO: 246) | | | | |
| -AYD | | | QHYMAYDAT | | | | |
| | | | (SEQ ID | | | | |
| | | | NO: 683) | | | | |
| -AFN | | | | QHYQAFNAT | | | |
| | | | | (SEQ ID | | | |
| | | | | NO: 247) | | | |

TABLE 19b
AGYS+1 and QHYA CDRL3 Mutants Identified by ELISA
as binding to C. Albicans

| AGYS+1 | | QHYA | |
|---|---|---|---|
| QHYRPHTGAT | (SEQ ID NO: 82) | NPLSGYSAT | (SEQ ID NO: |
| | | | 248) |
| QHYTAHDGAT | (SEQ ID NO: 83) | | |
| QHYTAHRGAT | (SEQ ID NO: 84) | | |
| QHYRAHTGAT | (SEQ ID NO: 85) | | |
| QHYTAHTGAT | (SEQ ID NO: 86) | | |
| QHYTDHHGAT | (SEQ ID NO: 87) | | |
| QHYTDHKGAT | (SEQ ID NO: 88) | | |
| QHYTDHRGAT | (SEQ ID NO: 89) | | |
| QHYTDHYGAT | (SEQ ID NO: 90) | | |
| QHYTAHNGAT | (SEQ ID NO: 684) | | |
| QHYTPHFGAT | (SEQ ID NO: 685) | | |
| QHYRAHSGAT | (SEQ ID NO: 686) | | |

TABLE 20a
Affinities of selected Fabs

| | | Approximate Affinity (method of |
|---|---|---|
| Fab | CDRL3 | determination) |
| 4F8 | QHYKEWRAT | 9 μg/mL (FACS) |
| 1F8 | QHYLPFNAT | unknown |
| 1H12 | QHYMPYRAS | 9 μg/mL (luminescent ELISA) |
| A4F10 | QHYTDHYGAT | 1 μg/mL (luminescent ELISA) |
| A1G7 | QHYTDHRGAT | 1.5 μg/mL (luminescent ELISA) |
| P2H12 | QHYTDHHGAT | 2 μg/mL (luminescent ELISA) |

TABLE 20b
Binding data of Fabs as measure by ELISA and FACS

| Fab | CDRL3 | ELISA (RFU) | FACS (MF) |
|---|---|---|---|
| ID-1-RD4-P2C10 | QHYKPFMAT | 7900 | 10635 |
| ID-1-RD4-P2G9 | QHYQPFDAT | 4000 | 2350 |
| ID-1-RD5-P2H8 | QHYREWHAT | 3500 | 4930 |
| ID-2-RD4-P1A5 | QHYLSYNAT | 8137 | 4003 |
| ID-2-RD6-P1H10 | QHYQPFKAT | 5000 | 2190 |
| ID-2-RD6-P1H11 | QHYMAYDAT | 13000 | 3756 |
| ID-3-RD6-P1H10 | QHYTAHNGAT | 50000 | 3379 |
| ID-3-RD5-P2E9 | QHYTPHFGAT | 8000 | 8912 |
| ID-3-RD5-P2H7 | QHYRAHSGAT | 27000 | 10571 |
| 1H12 | QHYMPYRAS | 1709 | 2076 |
| Assay Background | | 950 | 100 |

### Example 7

### Generation of IgG

[0771] In this example, Fab antibodies identified in Example 6 above were converted into IgGs by cloning into either the 2G12 pCALM 8 His mammalian expression vector (SEQ ID NO:211) or the 2G12 pDR12 mammalian expression vector (SEQ ID NO:212), both of which contained the 2G12 heavy chain set forth in SEQ ID NOS:209 (identical to SEQ ID NO:160) and 210, respectively. Primers specific to the 5′ and 3′ end of the light chain of 2G12 were generated. The primers additionally contained sequences for restriction sites to allow cloning into each respective vector.

A. Cloning into pCALM Mammalian Expression Vector

[0772] Primers 2G12IgGLC-F and 2G12IgGLC-R (set forth in Table 21 below) were used to amplify the light chains of Fabs 1H12, 4F8 and 1F8. XhoI (2G12IgGLC-F) and EcoRI (2G12IgGLC-R) restriction sites are shown in bold in Table 21 below. For each reaction, each variant DNA (100 ng) was mixed with 20 pmoles of 2G12IgGLC-F and 20 pmoles of 2G12IgGLC-R and incubated in the presence of 1 μL Advantage HF2 Polymerase Mix (Clontech), 5 μL of 10c HF2 reaction buffer, 5 μL of 10×dNTP mixture and PCR grade water to a final reaction volume of 50 μL. The PCR was carried out using the following reaction conditions: 1 minute denaturation at 95° C., followed by 30 cycles of 5 seconds of denaturation at 95° C., 10 seconds of annealing at 60° C., and 30 seconds of extension at 68° C., then finishing with a 3 minute incubation at 68° C. The amplified fragments (735 bp) were gel-purified using a Gel Extraction Kit (Qiagen) according to the manufacturer's instruction. The purified products were run on 1% agarose gel and each fragment was gel-purified with Gel Extraction Kit (Qiagen) according to the manufacturer's instruction.

[0773] The gel-purified fragments were digested with XhoI and EcoRI and subsequently ligated into the similarly digested 2G12 pCALM 8 His mammalian expression vector in the presence of T4 DNA ligase.

B. Cloning into pDR12 Mammalian Expression Vector

[0774] Primers 2G12HindIIILC-F1, 2G12HindIIILC-F2 and 2G12EcoRILC-R (set forth in Table 21 below) were used to amplify the light chains of Fabs 1H12, A2A12, P2H12, A1E8, A1G7, A4F10, A5G10, P4H12, and P1F9. HindIII and EcoRI restriction sites are shown in bold in Table 21 below. For each reaction, each variant DNA (diluted 1:100 in Buffer EB) was mixed with 20 pmoles of 2G12HindIIILC-F1, 2 pmoles of 2G12HindIIILC-F2 and 20 pmoles of 2G12EcoRILC-R and incubated in the presence of 1 μL Advantage HF2 Polymerase Mix (Clontech), 5 μL of 10c HF2 reaction buffer, 5 μL of 10×dNTP mixture and PCR grade water to a final reaction volume of 50 μL. The PCR was carried out using the following reaction conditions: 1 minute denaturation at 95° C., followed by 30 cycles of 5 seconds of denaturation at 95° C., 10 seconds of annealing at 60° C., and 30 seconds of extension at 68° C., then finishing with a 3 minute incubation at 68° C. The amplified fragments (735 bp) were gel-purified using a Gel Extraction Kit (Qiagen) according to the manufacturer's instruction. The purified products were run on 1% agarose gel and each fragment was gel-purified with Gel Extraction Kit (Qiagen) according to the manufacturer's instruction.

[0775] The gel-purified fragments were digested with HindIII and EcoRI and subsequently ligated into the similarly digested 2G12 pDR12 mammalian expression vector in the presence of T4 DNA ligase.

TABLE 21
2G12 IgG Light Chain Primers

| | | | SEQ |
|---|---|---|---|
| | | | ID |
| Name | nt | Sequences | NO |
| 2G12IgGLC-F | 42 | GGTCCCTGGCTCGAGTGAGGTTGTTAT | 204 |
| | | GACCCAGTCTCCGTC | |
| 2G12IgGLC-R | 44 | CCTGGTACCGAATTCTTAGCATTCACC | 205 |
| | | ACGGTTGAAAGATTTGG | |
| 2G12HindIIILC- | 63 | GTAAGCAAGCTTATGGACATGAGAGTG | 206 |
| F1 | | CCTGCACAGCTGCTGGGACTGCTGCTG | |
| | | CTGTGGCTG | |
| 2G12HindIIILC- | 62 | GGACTGCTGCTGCTGTGGCTGCCAGGC | 207 |
| F2 | | GCCAAGTGCGACGTTGTTATGACCCAG | |
| | | TCTCCGTC | |
| 2G12EcoRILC-R | 46 | CGCTACGAATTCTCAGCATTCACCACG | 208 |
| | | GTTGAAAGATTTGGTAACC | |

TABLE 22
CDRL3s and library screened selected for
conversion to IgGs

| | | SEQ ID NO | SEQ ID NO | Library |
|---|---|---|---|---|
| IgG | CDRL3 | (CDRL3) | (VL) | Screened |
| 1H12 | QHYMPYRAS | 71 | 132 | AGYS |
| 1F8 | QHYLPFNAT | 41 | 102 | AGYS |
| 4F8 | QHYKEWRAT | 30 | 91 | AGYS |
| A1E8 | QHYTDHKGAT | 88 | 149 | AGYS+1 |
| A1G7 | QHYTDHRGAT | 89 | 150 | AGYS+1 |
| P1F9 | QHYRAHTGAT | 85 | 146 | AGYS+1 |
| A2A12 | QHYTAHTGAT | 86 | 147 | AGYS+1 |
| P2H12 | QHYTDHHGAT | 87 | 148 | AGYS+1 |
| A4F10 | QHYTDHYGAT | 90 | 151 | AGYS+1 |
| P4H12 | QHYTAHRGAT | 84 | 145 | AGYS+1 |
| A5G10 | QHYRPHTGAT | 82 | 143 | AGYS+1 |

### Example 8

### Characterization of 2G12 Variants with Improved Affinity for C. albicans

[0776] In this example the IgGs generated in Example 7 were assayed for their ability to bind to C. albicans and various other Candida species, namely C. krusei, C. tropicalis, and C. glabrata by both FACS assay and ELISA.

[0777] A. C. albicans Binding by FACS Assay

[0778] Selected IgG antibodies generated in Example 7 were tested for their ability to bind C. albicans by FACS assay. The C. albicans cells were prepared as follows. A starter culture was first prepared by inoculation of 10 mL of YPD medium with a single colony of C. albicans (Cat. No. 10231, ATCC). The cells were cultured at 37° C. with shaking at 170 rpm for 24 hours and subsequently washed 2× with PBS. The cells were fixed by incubating in 1% formaldehyde in PBS for 30 min at room temperature. Following fixation, the cells were washed 2× in PBS, resuspended in fresh PBS and counted (cells/mL).

[0779] Approximately 1×10⁶ C. albicans cells in PBS were transferred to each well of a 96-well deep well plate. The plate was subsequently centrifuged to pellet the cells and the supernatant was removed. The cells were then resuspended in 125 μL of 2% BSA in PBS (a 1:5 dilution of a 1 0% stock solution). The IgG antibodies were serially diluted in PBS (from a concentration of 0.1 to 200 nM). 125 pt each dilution was added to each well (final concentration of 1% BSA). 125 μL of PBS was added to control wells. The plate was then centrifuged for 30 seconds to pool the liquid at the bottom of the wells followed by incubation for 1 hour at room temperature with shaking.

[0780] Following incubation, the plate was centrifuged for 5 minutes at 5000 rpm to pellet the cells. The supernatant was removed by inverting the plate and the cells were washed 2× with 1 mL PBS. The cells were resuspended in 250 μL1% BSA in PBS containing 5 μg/mL secondary antibody (anti human IgG, Alexa fluor 488, Invitrogen). The plate was then centrifuged for 30 seconds to pool the liquid at the bottom of the wells followed by incubation for 1 hour at room temperature with shaking while shielded from all light. Following incubation, the plate was centrifuged for 5 minutes at 5000 rpm to pellet the cells. The supernatant was removed by inverting the plate and the cells were washed 2× with 1 mL PBS. The cells were resuspended in 200 μl, PBS. FACS was performed in a FL-1 channel, using the sample that contained only PBS as a control.

[0781] The data is shown in Table 23 below, which sets forth the antibody and concentration at 50% maximum binding. 2G12 LC 3ALA (SEQ ID NO:159) which contains three alanine mutations in light chain CDRL3 does not show appreciable binding to C. albicans. Wildtype 2G12 binds at about 150 nM while CDRL3 mutants 1H12 (QHYMPYRAS, SEQ ID NO:71), 1F8 (QHYLPFNAT, SEQ ID NO:41) and 4F8 (QHYKEWRAT, SEQ ID NO:30) all have from 10- to 30-fold increased binding affinity to C. albicans. 2G12 Polymun (Cat. No. AB002, Polymun Scientific) binds at approximately 500 nM. The difference in affinity between 2G12 and 2G12 Polymun is due to the fact the 2G12 contains IgG aggregates (approximately 8-10% aggregates) which increase the affinity for binding to C. albicans.

TABLE 23
Binding to C. albicans by FACS

| Antibody (IgG) | [50% Max] | |
|---|---|---|
| 2G12 LC 3ALA | N/D | |
| 2G12 Polymun | 500 | nM |
| 2G12 | 150 | nM |
| 1H12 | 5.2 | nM |
| 1F8 | 15.1 | nM |
| 4F8 | 9.4 | nM |

[0782] B. C. krusei, C. tropicalis, and C. glabrata binding by FACS Assay Selected IgGs were analyzed for their ability to bind to C. albicans, C. krusei, C. tropicalis, and C. glabrata by FACS assay. The C. krusei, C. tropicalis, and C. glabrata used in the assay were clinical isolates. The assay was performed as described in Example 8.A. above. The antibodies were tested at concentrations between 0.1 and 1000 nM. 2G12 Polymun (Cat. No. AB002, Polymun Scientific) was used as a control. The antibodies that were tested are set forth in Table 24. Antibodies A1E8, A1G7, A2A12, P2H12, A4F10, and A5G10 bind C. albicans and C. krusei with an affinity of approximately 50 nM. Antibodies A1E8, A1G7, A2A12, P2H12, A4F10, and A5G10 bind C. tropicalis with an affinity between approximately 50-100 nM. Antibodies A1E8, A1 G7, A2A12, P2H12, A4F10, and A5G10 bind C. glabrata but do not show appreciable binding at the tested antibody concentrations. 2G12 Polymun does not show appreciable binding to any of the isolates. Selected affinities for the various Candida isolates are set forth in Table 25 below. CDRL3 mutants 1H12 and P1F9 bind to all 4 isolates with low nanomolar affinity.

TABLE 24
IgGs screened for binding to C. albicans, C.
krusei, C. tropicalis, and C. glabrata by FACS

| | | SEQ ID NO | SEQ ID NO | Library |
|---|---|---|---|---|
| IgG | CDRL3 | (CDRL3) | (VL) | Screened |
| 2G12 | QHYAGYSAT | 2 | — | N/A |
| Polymun | | | | |
| 1H12 | QHYMPYRAS | 30 | 91 | AGYS |
| A1E8 | QHYTDHKGAT | 88 | 149 | AGYS+1 |
| A1G7 | QHYTDHRGAT | 89 | 150 | AGYS+1 |
| P1F9 | QHYRAHTGAT | 85 | 146 | AGYS+1 |
| A2A12 | QHYTAHTGAT | 86 | 147 | AGYS+1 |
| P2H12 | QHYTDHHGAT | 87 | 148 | AGYS+1 |
| A4F10 | QHYTDHYGAT | 90 | 151 | AGYS+1 |
| P4H12 | QHYTAHRGAT | 84 | 145 | AGYS+1 |
| A5G10 | QHYRPHTGAT | 82 | 143 | AGYS+1 |

TABLE 25
Selected affinities for C. albicans, C. krusei,
C. tropicalis, and C. glabrata

| | C. albicans | C. krusei | C. tropicalis | C. glabrata |
|---|---|---|---|---|
| 2G12 | ~500 nM | ~1000 nM | n/a | n/a |
| Polymun | | | | |
| 1H12 | 10 nM | 17 nM | 23 nM | 12 nM |
| P1F9 | 23 nM | 27 nM | 51 nM | 102 nM |
| P4H12 | N/D | N/D | 21 nM | N/D |
| A5G10 | N/D | N/D | N/D | 72 nM |

[0783] C. C. albicans ELISA Binding Assay

[0784] Select IgG antibodies generated in Example 7 were tested for their ability to bind C. albicans by ELISA assay. Binding was detected by detecting a colorimetric change (absorbance at 450 nm) or by detecting bioluminescence.

[0785] General Procedure

[0786] The C. albicans cells were prepared as follows. A starter culture was first prepared by inoculation of 10 mL of YPD medium with a single colony of C. albicans (Cat. No. 10231, ATCC). The cells were cultured at 37° C. with shaking at 170 rpm for 24 hours. A coating culture was prepared by transferring 500 μL of starter culture into 10 mL of YPD medium. The cells were cultured at 37° C. with shaking at 170 rpm for 24 hours.

[0787] Following incubation, the coating culture was diluted 1:3 in YPD medium and plated in a 96-well plate (see Table 26 below). A negative control plate was prepared by coating with chicken albumin (Sigma) at a concentration of 2 μg/mL in PBS. The plates were sealed with Qiagen tape pad and incubated at 37° C. overnight. Following overnight incubation, the plates were washed 5× with PBS containing 0.05% Tween20. The plates were then blocked with 4% NFDM in PBS (see Table 26 below) and incubated at 37° C. for 2 hours. Following blocking, the plates were washed 2× with PBS containing 0.05% Tween20.

[0788] The IgGs to be tested were serially diluted in 4% NFDM in PBS with 0.05% Tween20 and each dilution series was transferred to a C. albicans coated plate and an chicken albumin coated plate. 4% NFDM in PBS with 0.05% Tween20 was added to one well of each plate for a “secondary only” control. The plates were sealed with Qiagen tape pad and incubated at 37° C. for 2 hours. Following incubation, the plates were washed 5× with PBS containing 0.05% Tween20. Goat anti-Human Fab Min X secondary antibody (Cat. No. 31414, Pierce) was added to each well according to the dilutions and amounts listed in Table 26 below. The plates were sealed with Qiagen tape pad and incubated at 37° C. for 1 hour. Following incubation, the plates were washed 5× with PBS containing 0.05% Tween20.

TABLE 26
Summary of volume of reagents used in ELISA

| | Coating C. | Block (4% | | Goat anti-Human Fab |
|---|---|---|---|---|
| | Albicans | NFDM in | | Min X Secondary |
| Assay | Cells | PBS) | IgG | Antibody |
| Colorimetric | 50 μL | 130 μL | 50 μL | 1:1000 dilution |
| | | | | 50 μL |
| Luminescent | 100 μL | 250 μL | 100 μL | 1:50000 dilution |
| | | | | 100 μL |

[0789] Detection

[0790] Colorimetric: Add 50 μL TMB Substrate (Cat. No. 34021, Pierce) to each well and incubate for 5-10 minutes. Stop the reaction by adding 50 μL 1.0 N. H₂S0₄ and read the absorbance at 450 nm using an ELISA plate reader.

[0791] Luminescence: Add 50 μl, Supersignal ELISA Femtomax Sensitivity Substrate (Pierce) to each well. Measure the luminescence (RLU, relative light units) using a Biotek Synergy2 luminometer.

[0792] Results

[0793] Selected IgGs were analyzed for their ability to bind to C. albicans using colorimetric detection. The antibodies were tested at concentrations between 0.0001 and 500 nM. 2G12 Polymun (Cat. No. AB002, Polymun Scientific) and 2F5 Polymun (Cat. No. AB0001, Polymun Scientific) were used as controls. The data is set forth in Table 27 below. Antibody 2F5 Polymun, a monoclonal antibody that binds HIV gp120, did not bind to C. albicans. 2G12 Polymun bound with a 50% Max concentration of 76.3 nM while 2G12 had a 8-fold higher affinity. The difference in affinity between 2G12 and 2G12 Polymun is due to the fact the 2G12 contains IgG aggregates which increase the affinity for binding to C. albicans. CDRL3 mutants 1H12, 1F8 and 4F8 all bind with a 50% Max concentration of approximately 1 nM.

TABLE 27
Binding to C. albicans by ELISA

| Antibody (IgG) | CDRL3 | [50% Max] |
|---|---|---|
| 2F5 Polymun | — | N/D |
| 2G12 Polymun | QHYAGYSAT | 76.3 nM |
| 2G12 | QHYAGYSAT | 9.7 nM |
| 1H12 | QHYMPYRAS | 0.4 nM |
| 1F8 | QHYLPFNAT | 0.9 nM |
| 4F8 | QHYKEWRAT | 1.3 nM |

[0794] The antibodies listed in Table 22 above were tested for their ability to bind C. albicans by ELISA using both colorimetric and luminescent detection. The antibodies were tested at concentrations between 0.05 and 700 nM. 2G12 Polymun (Cat. No. AB002, Polymun Scientific) and Fab AC8 were used as controls. Selected data is set forth in Table 27 below. Negative control Fab AC8 did not bind to C. albicans. 2G12 Polymun did not show appreciable binding by luminescence and bound with an EC50 of approximately 500 nM using colorimetric detection. CDRL3 mutant 1H12 had the highest affinity of all the antibodies tested. Antibodies A1E8, A1G7, P1F9, A2A12, P2H12, A4F10, P4H12 and A5G10 all bind C. albicans with the same affinity, between 3.2 and 19 nM.

TABLE 27
Binding to C. albicans by ELISA

| | | Colorimetric | Luminescent |
|---|---|---|---|
| IgG | CDRL3 | ELISA | ELISA |
| 2G12 | QHYAGYSAT | ~500 nM | N/A |
| Polymun | | | |
| 1H12 | QHYMPYRAS | 0.82 nM | 6.1 nM |
| P1F9 | QHYRAHTGAT | 3.2 nM | 19 nM |

[0795] Since modifications will be apparent to those of skill in this art, it is intended that this invention be limited only by the scope of the appended claims.

1. An anti-Candida antibody, wherein:
the antibody is a domain-exchanged antibody that binds to an epitope presented on Candida with an affinity of equal to or less than or about 100 nM;
the antibody is not 2G12; and 2G12 comprises a variable heavy chain comprising a sequence of amino acids set forth as amino acids 4-120 of SEQ ID NO:154 and a variable light chain comprising a sequence of amino acids set forth as amino acids 4-105 of SEQ ID NO:155.

2. The anti-Candida antibody of claim 1 that is a full length domain-exchanged antibody or is an antibody fragment thereof selected from a domain-exchanged Fab fragment, a domain-exchanged scFv fragment, a domain-exchanged Fab hinge fragment, domain-exchanged scFv tandem fragment, domain-exchanged scFv tandem fragment or a domain-exchanged single chain Fab fragment.

3. The anti-Candida antibody of claim 1 that is a modified 2G12 antibody, wherein the modification(s) comprises replacement, addition or deletion of an amino acid.

4. The anti-Candida antibody of claim 3, wherein the modification(s) is/are in a complementarity determining region (CDR).

5. The anti-Candida antibody of claim 4, wherein amino acid residue 57 in the heavy chain, based on Kabat numbering, is not modified.

6. The anti-Candida antibody of claim 3 that comprises a variable light chain (V_{L}) complementarity determining region 3 (CDR3) having a sequence of amino acids that contains one or more modifications compared to the V_{L} CDR3 of 2G12 set forth in SEQ ID NO:2.

7. The anti-Candida antibody of claim 6, wherein a modification(s) is selected from among:
an amino acid replacement at one or more positions selected from among L89, L90, L91, L92, L93, L94 and L95, based on Kabat numbering; and
an amino acid addition immediately before or immediately following one or more positions selected from among L89, L90, L91, L92, L93, L94 and L95, based on Kabat numbering.

8. The anti-Candida antibody of claim 7, wherein the one or more modifications are at one or more positions selected from among L92, L93, L94, and L95 of the V_{L} CDR3 of 2G12, based on Kabat numbering.

9. The anti-Candida antibody of claim 7, further comprising an amino acid addition after amino acid residue L95, based on Kabat numbering.

10. The anti-Candida antibody of claim 7, wherein the one or more modifications are at one or more positions selected from among L89, L90, L91, and L92 of the V_{L} CDR3 of 2G12, based on Kabat numbering.

11. The anti-Candida antibody of claim 3, wherein the V_{L} CDR3 of the anti-Candida antibody comprises a V_{L} CDR3 having an amino acid sequence set forth in any of SEQ ID NOS: 30-90, 218-248, 280 or 281 or a sequence having 70%, 75%, 80%, 85%, 90%, 91%, 92%, 93%, 94%, 95%, 96%, 97%, 98%, or 99% sequence identity to any of SEQ ID NOS: 30-90, 218-248, 280 or 281.

12. The anti-Candida antibody of claim 11, wherein the V_{L} CDR3 is selected from among QHYMPYRAS (SEQ ID NO:71), QHYLPFNAT (SEQ ID NO:41), QHYKEWRAT (SEQ ID NO:30), QHYTDHKGAT (SEQ ID NO:88), QHYTDHRGAT (SEQ ID NO:89), QHYRAHTGAT (SEQ ID NO:85), QHYTAHTGAT (SEQ ID NO:86), QHYTDHHGAT (SEQ ID NO:87), QHYTDHYGAT (SEQ ID NO:90), QHYTAHRGAT (SEQ ID NO:84), and QHYRPHTGAT (SEQ ID NO:82), or a sequence having 70%, 75%, 80%, 85%, 90%, 91%, 92%, 93%, 94%, 95%, 96%, 97%, 98%, or 99% sequence identity to any of SEQ ID NOS: 30, 41, 71, 82 or 84-90.

13. The anti-Candida antibody of claim 3, wherein:
the heavy chain comprises a 2G12 variable heavy chain (V_{H}) CDR1 set forth in SEQ ID NO: 163, a 2G12 V_{H} CDR2 set forth in SEQ ID NO:164, and a 2G12 V_{H} CDR3 set forth in SEQ ID NO:152; and
the light chain comprises a 2G12 V_{L} CDR1 set forth in SEQ ID NO:165, a 2G12 V_{L} CDR2 set forth in SEQ ID NO:166, and a modified 2G12 V_{L} CDR3 set forth in any of SEQ ID NOS: 30-90, 218-248, 280 or 281.

14. The anti-Candida antibody of claim 3, comprising:
a variable light chain comprising a sequence of amino acids set forth as amino acids 4-105 of any of SEQ ID NO: 91-151, 249-279 or 282-283, or a sequence having at least 70% sequence identity therewith; and
a variable heavy chain comprising a sequence of amino acids set forth as amino acids 4-120 of SEQ ID NO:154.

15. The anti-Candida antibody of claim 14 comprising:
a variable light chain having a sequence of amino acids set forth as amino acids 1-107 of SEQ ID NOS: 457-508 or 518-550; amino acids 1-108 of SEQ ID NOS: 91-142, 249-279, 282-283 or 509-517; or amino acids 1-109 of SEQ ID NOS: 143-151, or a sequence having at least 70% sequence identity therewith; and
a variable heavy chain having a sequence of amino acids set forth in SEQ ID NO:154.

16. The anti-Candida antibody of claim 3, wherein the V_{L} CDR3 of the anti-Candida antibody comprises a V_{L} CDR3 having an amino acid sequence set forth in any of SEQ ID NOS: 678-686 or a sequence having 70%, 75%, 80%, 85%, 90%, 91%, 92%, 93%, 94%, 95%, 96%, 97%, 98%, or 99% sequence identity to any of SEQ ID NOS: 678-686.

17. The anti-Candida antibody of claim 16, wherein:
the heavy chain comprises a 2G12 variable heavy chain (V_{H}) CDR1 set forth in SEQ ID NO: 163, a 2G12 V_{H} CDR2 set forth in SEQ ID NO:164, and a 2G12 V_{H} CDR3 set forth in SEQ ID NO:152; and
the light chain comprises a 2G12 V_{L} CDR1 set forth in SEQ ID NO:165, a 2G12 V_{L} CDR2 set forth in SEQ ID NO:166, and a modified 2G12 V_{L} CDR3 set forth in any of SEQ ID NOS: 678-686.

18. The anti-Candida antibody of claim 3, comprising:
a variable light chain comprising a sequence of amino acids set forth as amino acids 4-105 of any of SEQ ID NO: 687-695, or a sequence having at least 70% sequence identity therewith; and
a variable heavy chain comprising a sequence of amino acids set forth as amino acids 4-120 of SEQ ID NO:154.

19. The anti-Candida antibody of claim 18, comprising:
a variable light chain having a sequence of amino acids set forth as amino acids 1-107 of SEQ ID NOS: 696-701; amino acids 1-108 of SEQ ID NOS: 687-692 or 702-704; or amino acids 1-109 of SEQ ID NOS: 693-695, or a sequence having at least 70% sequence identity therewith; and
a variable heavy chain having a sequence of amino acids set forth in SEQ ID NO:154.

20. The anti-Candida antibody of claim 3 that is a Fab, a Fab dimer, or a full-length antibody.

21. The anti-Candida antibody of claim 1 that has greater affinity for Candida compared to the affinity of the corresponding form of the domain-exchanged antibody 2G12.

22. The anti-Candida antibody of claim 1, wherein the Candida species is selected from among C. albicans, C. tropicalis, C. parapsilosis, C. krusei, C. glabrata, C. lusitaniae, C. dubliniensis and C. guilliermondii.

23. The anti-Candida antibody of claim 1, comprising:
a light chain having a sequence of amino acids set forth in SEQ ID NO:91, 102, 132, 143, 145-151, 457, 468, 498, 509, 511-517; and
a heavy chain having a sequence of amino acids set forth in SEQ ID NO:10; or having a sequence of amino acids set forth in SEQ ID NO:209 or 210.

24. The anti-Candida antibody of claim 1, comprising:
(a) a light chain having a sequence of amino acids set forth in SEQ ID NO:91, 102, 132, 143, 145, 146, 457, 468, 498, 509, 511 or 512; and a heavy chain having a sequence of amino acids set forth in SEQ ID NO:10; or having a sequence of amino acids set forth in SEQ ID NO: 209 or 210; or:
(b) a light chain having a sequence of amino acids set forth in SEQ ID NOS:687-704; and a heavy chain having a sequence of amino acids set forth in SEQ ID NO:10; or having a sequence of amino acids set forth in SEQ ID NO:209 or 210.

25. The anti-Candida antibody of claim 1 that is a dimer.

26. The anti-Candida antibody of claim 3, wherein the antibody or antibody fragment is conjugated to polyethylene glycol (PEG) and/or a multimerization domain.

27. A domain exchanged antibody that binds to the same epitope as an antibody of claim 1, wherein:
the antibody is not 2G12; and
2G12 comprises a variable heavy chain comprising a sequence of amino acids set forth as amino acids 4-120 of SEQ ID NO:154 and a variable light chain comprising a sequence of amino acids set forth as amino acids 4-105 of SEQ ID NO:155.

28. A combination, comprising:
an anti-Candida antibody of claim 1; and
an antifungal agent or one or more additional antifungal antibodies that differ from the first antibody.

29. The combination of claim 28, that comprises an additional antifungal antibody, wherein the additional antifungal antibody is an anti-Candida antibody, whereby the combination comprises two or more different anti-Candida antibodies.

30. The combination of claim 29, wherein the additional antibody is a full-length antibody, a single-chain Fv (scFv), Fab, Fab′, F(ab′)₂, Fv, dsFv, diabody, Fd, Fd′ fragment, or a domain-exchanged antibody or antibody fragment thereof.

31. The combination of claim 28, wherein the antibody and the antifungal agent or additional antifungal antibody are formulated as a single composition or separate compositions.

32. A pharmaceutical composition, comprising:
an anti-Candida antibody of claim 1 in a pharmaceutically acceptable carrier or excipient.

33. The pharmaceutical composition of claim 32 that comprises a plurality of anti-Candida antibodies.

34. The pharmaceutical composition of claim 32 that is formulated for systemic, parenteral, topical, oral, mucosal, intranasal, subcutaneous, aerosolized, intravenous, bronchial, pulmonary, vaginal, vulvovaginal, esophageal, or oesophageal administration.

35. A method of treating or preventing a fungal infection in a subject, comprising administering to the subject a therapeutically effective amount of the pharmaceutical composition of claim 32.

36. The method of claim 35, wherein the human subject is a human infant, a human infant born prematurely or at risk of hospitalization for a fungal infection, an elderly human, a human subject who has congenital immunodeficiency, acquired immunodeficiency, HIV, leukemia, or non-Hodgkin lymphoma, is receiving or has received high dosage antibiotic therapy, or a human subject having an organ or tissue transplant or a blood transfusion.

37. A polynucleotide(s) encoding an antibody of claim 1.

38. A polynucleotide encoding the light chain of an antibody of claim 1.

39. A vector(s), comprising the a polynucleotide(s) encoding an antibody of claim 1 or encoding the light chain of an antibody of claim 1.

40. A host cell, comprising a vector of claim 39.

41. The anti-Candida antibody of claim 1 that is selected from among 1H12, 1F8, 4F8, A1E8, A1G7, P1F9, A2A12, P2H12, A4F10, P4H12, A5G10, ID-1-RD4-P2C10, ID-1-RD4-P2G9, ID-1-RD5-P2H8, ID-2-RD4-P1A5, ID-2-RD6-P1H10, ID-2-RD6-P1H11, ID-3-RD6-P1H10, ID-3-RD5-P2E9 or ID-3-RD5-P2H and an antibody fragment thereof.

42. The anti-Candida antibody of claim 41 that is a Fab dimer.

The application's sequence listing, which the Patent Office published only in electronic form, follows.

SEQUENCE LISTING (713 sequences)

SEQ ID NO: 1 - DNA, 5882 bp, Artificial Sequence
  2G12 pCAL IT*
gtggcacttttcggggaaatgtgcgcggaacccctatttgtttatttttctaaatacattcaaatatgtatccgctcatgagacaataaccctgataaatgcttcaataatattgaaaaaggaagagtatgagtattcaacatttccgtgtcgcccttattcccttttttgcggcattttgccttcctgtttttgctcacccagaaacgctggtgaaagtaaaagatgctgaagatcagttgggtgcacgagtgggttacatcgaactggatctcaacagcggtaagatccttgagagttttcgccccgaagaacgttttccaatgatgagcacttttaaagttctgctatgtggcgcggtattatcccgtattgacgccgggcaagagcaactcggtcgccgcatacactattctcagaatgacttggttgagtactcaccagtcacagaaaagcatcttacggatggcatgacagtaagagaattatgcagtgctgccataaccatgagtgataacactgcggccaacttacttctgacaacgatcggaggaccgaaggagctaaccgcttttttgcacaacatgggggatcatgtaactcgccttgatcgttgggaaccggagctgaatgaagccataccaaacgacgagcgtgacaccacgatgcctgtagcaatggcaacaacgttgcgcaaactattaactggcgaactacttactctagcttcccggcaacaattaatagactggatggaggcggataaagttgcaggaccacttctgcgctcggcccttccggctggctggtttattgctgataaatctggagccggtgagcgtgggtctcgcggtatcattgcagcactggggccagatggtaagccctcccgtatcgtagttatctacacgacggggagtcaggcaactatggatgaacgaaatagacagatcgctgagataggtgcctcactgattaagcattggtaactgtcagaccaagtttactcatatatactttagattgatttaaaacttcatttttaatttaaaaggatctaggtgaagatcctttttgataatctcatgaccaaaatcccttaacgtgagttttcgttccactgagcgtcagaccccgtagaaaagatcaaaggatcttcttgagatcctttttttctgcgcgtaatctgctgcttgcaaacaaaaaaaccaccgctaccagcggtggtttgtttgccggatcaagagctaccaactctttttccgaaggtaactggcttcagcagagcgcagataccaaatactgtccttctagtgtagccgtagttaggccaccacttcaagaactctgtagcaccgcctacatacctcgctctgctaatcctgttaccagtggctgctgccagtggcgataagtcgtgtcttaccgggttggactcaagacgatagttaccggataaggcgcagcggtcgggctgaacggggggttcgtgcacacagcccagcttggagcgaacgacctacaccgaactgagatacctacagcgtgagctatgagaaagcgccacgcttcccgaagggagaaaggcggacaggtatccggtaagcggcagggtcggaacaggagagcgcacgagggagcttccagggggaaacgcctggtatctttatagtcctgtcgggtttcgccacctctgacttgagcgtcgatttttgtgatgctcgtcaggggggcggagcctatggaaaaacgccagcaacgcggcctttttacggttcctggccttttgctggccttttgctcacatgttctttcctgcgttatcccctgattctgtggataaccgtattaccgcctttgagtgagctgataccgctcgccgcagccgaacgaccgagcgcagcgagtcagtgagcgaggaagcgacaccatcgaatggcgcaaaacctttcgcggtatggcatgatagcgcccggaagagagtcaattcagggtggtgaatgtgaaaccagtaacgttatacgatgtcgcagagtatgccggtgtctcttatcagaccgtttcccgcgtggtgaaccaggccagccacgtttctgcgaaaacgcgggaaaaagtggaagcggcgatggcggagctgaattacattcccaaccgcgtggcacaacaactggcgggcaaacagtcgttgctgattggcgttgccacctccagtctggccctgcacgcgccgtcgcaaattgtcgcggcgattaaatctcgcgccgatcaactgggtgccagcgtggtggtgtcgatggtagaacgaagcggcgtcgaagcctgtaaagcggcggtgcacaatcttctcgcgcaacgcgtcagtgggctgatcattaactatccgctggatgaccaggatgccattgctgtggaagctgcctgcactaatgttccggcgttatttcttgatgtctctgaccagacacccatcaacagtattattttctcccatgaagacggtacgcgactgggcgtggagcatctggtcgcattgggtcaccagcaaatcgcgctgttagcgggcccattaagttctgtctcggcgcgtctgcgtctggctggctggcataaatatctcactcgcaatcaaattcagccgatagcggaacgggaaggcgactggagtgccatgtccggttttcaacaaaccatgcaaatgctgaatgagggcatcgttcccactgcgatgctggttgccaacgatcagatggcgctgggcgcaatgcgcgccattaccgagtccgggctgcgcgttggtgcggatatctcggtagtgggatacgacgataccgaagacagctcatgttatatcccgccgttaaccaccatcaaacaggattttcgcctgctggggcaaaccagcgtggaccgcttgctgcaactctctcagggccaggcggtgaagggcaatcagctgttgcccgtctcactggtgaaaagaaaaaccaccctggcgcccaatacgcaaaccgcctctccccgcgcgttggccgattcattaatgcagctggcacgacaggtttcccgactggaaagcgggcagtgagcggtacccgataaaagcggcttcctgacaggaggccgttttgttttgcagcccacctcaacgcaattaatgtgagttagctcactcattaggcaccccaggctttacactttatgcttccggctcgtatgttgtgtggaattgtgagcggataacaattgaattaaggaggatataattatgaaatacctgctgccgaccgcagccgctggtctgctgctgctcgcggcctagccggccatggccgccggtgttgttatgacccagtctccgtctaccctgtctgcttctgttggtgacaccatcaccatcacctgccgtgcttctcagtctatcgaaacctggctggcttggtaccagcagaaaccgggtaaagctccgaaactgctgatctacaaggcttctaccctgaaaaccggtgttccgtctcgtttctctggttctggttctggtaccgagttcaccctgaccatctctggtctgcagttcgacgacttcgctacctaccactgccagcactacgctggttactctgctaccttcggtcagggtacccgtgttgaaatcaaacgtaccgttgctgctccgtctgttttcatcttcccgccgtctgacgaacagctgaaatctggtaccgcttctgttgtttgcctgctgaacaacttctacccgcgtgaagctaaagttcagtggaaagttgacaacgctctgcagtctggtaactctcaggaatctgttaccgaacaggactctaaagactctacctactctctgtcttctaccctgaccctgtctaaagctgactacgaaaagcacaaagtttacgcttgcgaagttacccaccagggtctgtcttctccggttaccaaatctttcaaccgtggtgaatgctaattaattaataaggaggatataattatgaaaaagacagctatcgcgattgcagtggcactggctggtttcgctaccgtagcctaggcggccgcagaagttcagctggttgaatctggtggtggtctggttaaagctggtggttctctgatcctgtcttgcggtgtttctaacttccgtatctctgctcacaccatgaactgggttcgtcgtgttccgggtggtggtctggaatgggttgcttctatctctacctcttctacctaccgtgactacgctgacgctgttaaaggtcgtttcaccgtttctcgtgacgacctggaagacttcgtttacctgcagatgcataaaatgcgtgttgaagacaccgctatctactactgcgctcgtaaaggttctgaccgtctgtctgacaacgacccgttcgacgcttggggtccgggtaccgttgttaccgtttctccggcgtcgaccaaaggtccgtctgttttcccgctggctccgtcttctaaatctacctctggtggtaccgctgctctgggttgcctggttaaagactacttcccggaaccggttaccgtttcttggaactctggtgctctgacctctggtgttcacaccttcccggctgttctgcagtcttctggtctgtactctctgtcttctgttgttaccgttccgtcttcttctctgggtacccagacctacatctgcaacgttaaccacaaaccgtctaacaccaaagttgacaagaaagttgaaccgaaatcttgcctgcgatcgcggccaggccggccgcaccatcaccatcaccatggcgcatacccgtacgacgttccggactacgcttctactagttaggagggtggtggctctgagggtggcggttctgagggtggcggctctgagggaggcggttccggtggtggctctggttccggtgattttgattatgaaaagatggcaaacgctaataagggggctatgaccgaaaatgccgatgaaaacgcgctacagtctgacgctaaaggcaaacttgattctgtcgctactgattacggtgctgctatcgatggtttcattggtgacgtttccggccttgctaatggtaatggtgctactggtgattttgctggctctaattcccaaatggctcaagtcggtgacggtgataattcacctttaatgaataatttccgtcaatatttaccttccctccctcaatcggttgaatgtcgcccttttgtctttggcgctggtaaaccatatgaattttctattgattgtgacaaaataaacttattccgtggtgtctttgcgtttcttttatatgttgccacctttatgtatgtattttctacgtttgctaacatactgcgtaataaggagtcttaagctagctaacgatcgcccttcccaacagttgcgcagcctgaatggcgaatgggacgcgccctgtagcggcgcattaagcgcggcgggtgtggtggttacgcgcagcgtgaccgctacacttgccagcgccctagcgcccgctcctttcgctttcttcccttcctttctcgccacgttcgccggctttccccgtcaagctctaaatcgggggctccctttagggttccgatttagtgctttacggcacctcgaccccaaaaaacttgattagggtgatggttcacgtagtgggccatcgccctgatagacggtttttcgccctttgacgttggagtccacgttctttaatagtggactcttgttccaaactggaacaacactcaaccctatctcggtctattcttttgatttataagggattttgccgatttcggcctattggttaaaaaatgagctgatttaacaaaaatttaacgcgaattttaacaaaatattaacgcttacaatttag

SEQ ID NO: 2 - protein, 9 aa, Artificial Sequence
  2G12 CDRL3
QHYAGYSAT

SEQ ID NO: 3 - protein, 9 aa, Artificial Sequence
  2G12 3Ala CDRL3
QHAAGAAAT

SEQ ID NO: 4 - DNA, 5882 bp, Artificial Sequence
  2G12 3-ALA pCAL IT* (contains 3Ala CDRH3)
gtggcacttttcggggaaatgtgcgcggaacccctatttgtttatttttctaaatacattcaaatatgtatccgctcatgagacaataaccctgataaatgcttcaataatattgaaaaaggaagagtatgagtattcaacatttccgtgtcgcccttattcccttttttgcggcattttgccttcctgtttttgctcacccagaaacgctggtgaaagtaaaagatgctgaagatcagttgggtgcacgagtgggttacatcgaactggatctcaacagcggtaagatccttgagagttttcgccccgaagaacgttttccaatgatgagcacttttaaagttctgctatgtggcgcggtattatcccgtattgacgccgggcaagagcaactcggtcgccgcatacactattctcagaatgacttggttgagtactcaccagtcacagaaaagcatcttacggatggcatgacagtaagagaattatgcagtgctgccataaccatgagtgataacactgcggccaacttacttctgacaacgatcggaggaccgaaggagctaaccgcttttttgcacaacatgggggatcatgtaactcgccttgatcgttgggaaccggagctgaatgaagccataccaaacgacgagcgtgacaccacgatgcctgtagcaatggcaacaacgttgcgcaaactattaactggcgaactacttactctagcttcccggcaacaattaatagactggatggaggcggataaagttgcaggaccacttctgcgctcggcccttccggctggctggtttattgctgataaatctggagccggtgagcgtgggtctcgcggtatcattgcagcactggggccagatggtaagccctcccgtatcgtagttatctacacgacggggagtcaggcaactatggatgaacgaaatagacagatcgctgagataggtgcctcactgattaagcattggtaactgtcagaccaagtttactcatatatactttagattgatttaaaacttcatttttaatttaaaaggatctaggtgaagatcctttttgataatctcatgaccaaaatcccttaacgtgagttttcgttccactgagcgtcagaccccgtagaaaagatcaaaggatcttcttgagatcctttttttctgcgcgtaatctgctgcttgcaaacaaaaaaaccaccgctaccagcggtggtttgtttgccggatcaagagctaccaactctttttccgaaggtaactggcttcagcagagcgcagataccaaatactgtccttctagtgtagccgtagttaggccaccacttcaagaactctgtagcaccgcctacatacctcgctctgctaatcctgttaccagtggctgctgccagtggcgataagtcgtgtcttaccgggttggactcaagacgatagttaccggataaggcgcagcggtcgggctgaacggggggttcgtgcacacagcccagcttggagcgaacgacctacaccgaactgagatacctacagcgtgagctatgagaaagcgccacgcttcccgaagggagaaaggcggacaggtatccggtaagcggcagggtcggaacaggagagcgcacgagggagcttccagggggaaacgcctggtatctttatagtcctgtcgggtttcgccacctctgacttgagcgtcgatttttgtgatgctcgtcaggggggcggagcctatggaaaaacgccagcaacgcggcctttttacggttcctggccttttgctggccttttgctcacatgttctttcctgcgttatcccctgattctgtggataaccgtattaccgcctttgagtgagctgataccgctcgccgcagccgaacgaccgagcgcagcgagtcagtgagcgaggaagcgacaccatcgaatggcgcaaaacctttcgcggtatggcatgatagcgcccggaagagagtcaattcagggtggtgaatgtgaaaccagtaacgttatacgatgtcgcagagtatgccggtgtctcttatcagaccgtttcccgcgtggtgaaccaggccagccacgtttctgcgaaaacgcgggaaaaagtggaagcggcgatggcggagctgaattacattcccaaccgcgtggcacaacaactggcgggcaaacagtcgttgctgattggcgttgccacctccagtctggccctgcacgcgccgtcgcaaattgtcgcggcgattaaatctcgcgccgatcaactgggtgccagcgtggtggtgtcgatggtagaacgaagcggcgtcgaagcctgtaaagcggcggtgcacaatcttctcgcgcaacgcgtcagtgggctgatcattaactatccgctggatgaccaggatgccattgctgtggaagctgcctgcactaatgttccggcgttatttcttgatgtctctgaccagacacccatcaacagtattattttctcccatgaagacggtacgcgactgggcgtggagcatctggtcgcattgggtcaccagcaaatcgcgctgttagcgggcccattaagttctgtctcggcgcgtctgcgtctggctggctggcataaatatctcactcgcaatcaaattcagccgatagcggaacgggaaggcgactggagtgccatgtccggttttcaacaaaccatgcaaatgctgaatgagggcatcgttcccactgcgatgctggttgccaacgatcagatggcgctgggcgcaatgcgcgccattaccgagtccgggctgcgcgttggtgcggatatctcggtagtgggatacgacgataccgaagacagctcatgttatatcccgccgttaaccaccatcaaacaggattttcgcctgctggggcaaaccagcgtggaccgcttgctgcaactctctcagggccaggcggtgaagggcaatcagctgttgcccgtctcactggtgaaaagaaaaaccaccctggcgcccaatacgcaaaccgcctctccccgcgcgttggccgattcattaatgcagctggcacgacaggtttcccgactggaaagcgggcagtgagcggtacccgataaaagcggcttcctgacaggaggccgttttgttttgcagcccacctcaacgcaattaatgtgagttagctcactcattaggcaccccaggctttacactttatgcttccggctcgtatgttgtgtggaattgtgagcggataacaattgaattaaggaggatataattatgaaatacctgctgccgaccgcagccgctggtctgctgctgctcgcggcctagccggccatggccgccggtgttgttatgacccagtctccgtctaccctgtctgcttctgttggtgacaccatcaccatcacctgccgtgcttctcagtctatcgaaacctggctggcttggtaccagcagaaaccgggtaaagctccgaaactgctgatctacaaggcttctaccctgaaaaccggtgttccgtctcgtttctctggttctggttctggtaccgagttcaccctgaccatctctggtctgcagttcgacgacttcgctacctaccactgccagcactacgctggttactctgctaccttcggtcagggtacccgtgttgaaatcaaacgtaccgttgctgctccgtctgttttcatcttcccgccgtctgacgaacagctgaaatctggtaccgcttctgttgtttgcctgctgaacaacttctacccgcgtgaagctaaagttcagtggaaagttgacaacgctctgcagtctggtaactctcaggaatctgttaccgaacaggactctaaagactctacctactctctgtcttctaccctgaccctgtctaaagctgactacgaaaagcacaaagtttacgcttgcgaagttacccaccagggtctgtcttctccggttaccaaatctttcaaccgtggtgaatgctaattaattaataaggaggatataattatgaaaaagacagctatcgcgattgcagtggcactggctggtttcgctaccgtagcctaggcggccgcagaagttcagctggttgaatctggtggtggtctggttaaagctggtggttctctgatcctgtcttgcggtgtttctaacttccgtatctctgctcacaccatgaactgggttcgtcgtgttccgggtggtggtctggaatgggttgcttctatctctacctcttctacctaccgtgactacgctgacgctgttaaaggtcgtttcaccgtttctcgtgacgacctggaagacttcgtttacctgcagatgcataaaatgcgtgttgaagacaccgctatctactactgcgctcgtaaaggttctgaccgtgcggcggacgcggacccgttcgacgcttggggtccgggtaccgttgttaccgtttctccggcgtcgaccaaaggtccgtctgttttcccgctggctccgtcttctaaatctacctctggtggtaccgctgctctgggttgcctggttaaagactacttcccggaaccggttaccgtttcttggaactctggtgctctgacctctggtgttcacaccttcccggctgttctgcagtcttctggtctgtactctctgtcttctgttgttaccgttccgtcttcttctctgggtacccagacctacatctgcaacgttaaccacaaaccgtctaacaccaaagttgacaagaaagttgaaccgaaatcttgcctgcgatcgcggccaggccggccgcaccatcaccatcaccatggcgcatacccgtacgacgttccggactacgcttctactagttaggagggtggtggctctgagggtggcggttctgagggtggcggctctgagggaggcggttccggtggtggctctggttccggtgattttgattatgaaaagatggcaaacgctaataagggggctatgaccgaaaatgccgatgaaaacgcgctacagtctgacgctaaaggcaaacttgattctgtcgctactgattacggtgctgctatcgatggtttcattggtgacgtttccggccttgctaatggtaatggtgctactggtgattttgctggctctaattcccaaatggctcaagtcggtgacggtgataattcacctttaatgaataatttccgtcaatatttaccttccctccctcaatcggttgaatgtcgcccttttgtctttggcgctggtaaaccatatgaattttctattgattgtgacaaaataaacttattccgtggtgtctttgcgtttcttttatatgttgccacctttatgtatgtattttctacgtttgctaacatactgcgtaataaggagtcttaagctagctaacgatcgcccttcccaacagttgcgcagcctgaatggcgaatgggacgcgccctgtagcggcgcattaagcgcggcgggtgtggtggttacgcgcagcgtgaccgctacacttgccagcgccctagcgcccgctcctttcgctttcttcccttcctttctcgccacgttcgccggctttccccgtcaagctctaaatcgggggctccctttagggttccgatttagtgctttacggcacctcgaccccaaaaaacttgattagggtgatggttcacgtagtgggccatcgccctgatagacggtttttcgccctttgacgttggagtccacgttctttaatagtggactcttgttccaaactggaacaacactcaaccctatctcggtctattcttttgatttataagggattttgccgatttcggcctattggttaaaaaatgagctgatttaacaaaaatttaacgcgaattttaacaaaatattaacgcttacaatttag

SEQ ID NO: 5 - DNA, 3513 bp, Artificial Sequence
  pCAL G13
gtggcacttttcggggaaatgtgcgcggaacccctatttgtttatttttctaaatacattcaaatatgtatccgctcatgagacaataaccctgataaatgcttcaataatattgaaaaaggaagagtatgagtattcaacatttccgtgtcgcccttattcccttttttgcggcattttgccttcctgtttttgctcacccagaaacgctggtgaaagtaaaagatgctgaagatcagttgggtgcacgagtgggttacatcgaactggatctcaacagcggtaagatccttgagagttttcgccccgaagaacgttttccaatgatgagcacttttaaagttctgctatgtggcgcggtattatcccgtattgacgccgggcaagagcaactcggtcgccgcatacactattctcagaatgacttggttgagtactcaccagtcacagaaaagcatcttacggatggcatgacagtaagagaattatgcagtgctgccataaccatgagtgataacactgcggccaacttacttctgacaacgatcggaggaccgaaggagctaaccgcttttttgcacaacatgggggatcatgtaactcgccttgatcgttgggaaccggagctgaatgaagccataccaaacgacgagcgtgacaccacgatgcctgtagcaatggcaacaacgttgcgcaaactattaactggcgaactacttactctagcttcccggcaacaattaatagactggatggaggcggataaagttgcaggaccacttctgcgctcggcccttccggctggctggtttattgctgataaatctggagccggtgagcgtgggtctcgcggtatcattgcagcactggggccagatggtaagccctcccgtatcgtagttatctacacgacggggagtcaggcaactatggatgaacgaaatagacagatcgctgagataggtgcctcactgattaagcattggtaactgtcagaccaagtttactcatatatactttagattgatttaaaacttcatttttaatttaaaaggatctaggtgaagatcctttttgataatctcatgaccaaaatcccttaacgtgagttttcgttccactgagcgtcagaccccgtagaaaagatcaaaggatcttcttgagatcctttttttctgcgcgtaatctgctgcttgcaaacaaaaaaaccaccgctaccagcggtggtttgtttgccggatcaagagctaccaactctttttccgaaggtaactggcttcagcagagcgcagataccaaatactgtccttctagtgtagccgtagttaggccaccacttcaagaactctgtagcaccgcctacatacctcgctctgctaatcctgttaccagtggctgctgccagtggcgataagtcgtgtcttaccgggttggactcaagacgatagttaccggataaggcgcagcggtcgggctgaacggggggttcgtgcacacagcccagcttggagcgaacgacctacaccgaactgagatacctacagcgtgagctatgagaaagcgccacgcttcccgaagggagaaaggcggacaggtatccggtaagcggcagggtcggaacaggagagcgcacgagggagcttccagggggaaacgcctggtatctttatagtcctgtcgggtttcgccacctctgacttgagcgtcgatttttgtgatgctcgtcaggggggcggagcctatggaaaaacgccagcaacgcggcctttttacggttcctggccttttgctggccttttgctcacatgttctttcctgcgttatcccctgattctgtggataaccgtattaccgcctttgagtgagctgataccgctcgccgcagccgaacgaccgagcgcagcgagtcagtgagcgaggaagcggaagagcgcccaatacgcaaaccgcctctccccgcgcgttggccgattcattaatgcagctggcacgacaggtttcccgactggaaagcgggcagtgagcgcaacgcaattaatgtgagttagctcactcattaggcaccccaggctttacactttatgcttccggctcgtatgttgtgtggaattgtgagcggataacaattgaattaaggaggatataattatgaaatacctgctgccgaccgcagccgctggtctgctgctgctcgcggcccagccggccatggccgccggtgcctaactctggctggtttcgctaccgtaaccggtttaattaataaggaggatataattatgaaaaagacagctatcgcgattgcagtggcactggctggtttcgctaccgtagcccaggcggccgcacgcgtctggttgaatctggtggggtctggaattctgcgatcgcggccaggccggccgcaccatcaccatcaccatggcgcatacccgtacgacgttccggactacgcttctactagttaggagggtggtggctctgagggtggcggttctgagggtggcggctctgagggaggcggttccggtggtggctctggttccggtgattttgattatgaaaagatggcaaacgctaataagggggctatgaccgaaaatgccgatgaaaacgcgctacagtctgacgctaaaggcaaacttgattctgtcgctactgattacggtgctgctatcgatggtttcattggtgacgtttccggccttgctaatggtaatggtgctactggtgattttgctggctctaattcccaaatggctcaagtcggtgacggtgataattcacctttaatgaataatttccgtcaatatttaccttccctccctcaatcggttgaatgtcgcccttttgtctttggcgctggtaaaccatatgaattttctattgattgtgacaaaataaacttattccgtggtgtctttgcgtttcttttatatgttgccacctttatgtatgtattttctacgtttgctaacatactgcgtaataaggagtcttaagctagctaacgatcgcccttcccaacagttgcgcagcctgaatggcgaatgggacgcgccctgtagcggcgcattaagcgcggcgggtgtggtggttacgcgcagcgtgaccgctacacttgccagcgccctagcgcccgctcctttcgctttcttcccttcctttctcgccacgttcgccggctttccccgtcaagctctaaatcgggggctccctttagggttccgatttagtgctttacggcacctcgaccccaaaaaacttgattagggtgatggttcacgtagtgggccatcgccctgatagacggtttttcgccctttgacgttggagtccacgttctttaatagtggactcttgttccaaactggaacaacactcaaccctatctcggtctattcttttgatttataagggattttgccgatttcggcctattggttaaaaaatgagctgatttaacaaaaatttaacgcgaattttaacaaaatattaacgcttacaatttag

SEQ ID NO: 6 - DNA, 4765 bp, Artificial Sequence
  2G12 pCAL G13 vector
gtggcacttttcggggaaatgtgcgcggaacccctatttgtttatttttctaaatacattcaaatatgtatccgctcatgagacaataaccctgataaatgcttcaataatattgaaaaaggaagagtatgagtattcaacatttccgtgtcgcccttattcccttttttgcggcattttgccttcctgtttttgctcacccagaaacgctggtgaaagtaaaagatgctgaagatcagttgggtgcacgagtgggttacatcgaactggatctcaacagcggtaagatccttgagagttttcgccccgaagaacgttttccaatgatgagcacttttaaagttctgctatgtggcgcggtattatcccgtattgacgccgggcaagagcaactcggtcgccgcatacactattctcagaatgacttggttgagtactcaccagtcacagaaaagcatcttacggatggcatgacagtaagagaattatgcagtgctgccataaccatgagtgataacactgcggccaacttacttctgacaacgatcggaggaccgaaggagctaaccgcttttttgcacaacatgggggatcatgtaactcgccttgatcgttgggaaccggagctgaatgaagccataccaaacgacgagcgtgacaccacgatgcctgtagcaatggcaacaacgttgcgcaaactattaactggcgaactacttactctagcttcccggcaacaattaatagactggatggaggcggataaagttgcaggaccacttctgcgctcggcccttccggctggctggtttattgctgataaatctggagccggtgagcgtgggtctcgcggtatcattgcagcactggggccagatggtaagccctcccgtatcgtagttatctacacgacggggagtcaggcaactatggatgaacgaaatagacagatcgctgagataggtgcctcactgattaagcattggtaactgtcagaccaagtttactcatatatactttagattgatttaaaacttcatttttaatttaaaaggatctaggtgaagatcctttttgataatctcatgaccaaaatcccttaacgtgagttttcgttccactgagcgtcagaccccgtagaaaagatcaaaggatcttcttgagatcctttttttctgcgcgtaatctgctgcttgcaaacaaaaaaaccaccgctaccagcggtggtttgtttgccggatcaagagctaccaactctttttccgaaggtaactggcttcagcagagcgcagataccaaatactgtccttctagtgtagccgtagttaggccaccacttcaagaactctgtagcaccgcctacatacctcgctctgctaatcctgttaccagtggctgctgccagtggcgataagtcgtgtcttaccgggttggactcaagacgatagttaccggataaggcgcagcggtcgggctgaacggggggttcgtgcacacagcccagcttggagcgaacgacctacaccgaactgagatacctacagcgtgagctatgagaaagcgccacgcttcccgaagggagaaaggcggacaggtatccggtaagcggcagggtcggaacaggagagcgcacgagggagcttccagggggaaacgcctggtatctttatagtcctgtcgggtttcgccacctctgacttgagcgtcgatttttgtgatgctcgtcaggggggcggagcctatggaaaaacgccagcaacgcggcctttttacggttcctggccttttgctggccttttgctcacatgttctttcctgcgttatcccctgattctgtggataaccgtattaccgcctttgagtgagctgataccgctcgccgcagccgaacgaccgagcgcagcgagtcagtgagcgaggaagcggaagagcgcccaatacgcaaaccgcctctccccgcgcgttggccgattcattaatgcagctggcacgacaggtttcccgactggaaagcgggcagtgagcgcaacgcaattaatgtgagttagctcactcattaggcaccccaggctttacactttatgcttccggctcgtatgttgtgtggaattgtgagcggataacaattgaattaaggaggatataattatgaaatacctgctgccgaccgcagccgctggtctgctgctgctcgcggcccagccggccatggccgccggtgttgttatgacccagtctccgtctaccctgtctgcttctgttggtgacaccatcaccatcacctgccgtgcttctcagtctatcgaaacctggctggcttggtaccagcagaaaccgggtaaagctccgaaactgctgatctacaaggcttctaccctgaaaaccggtgttccgtctcgtttctctggttctggttctggtaccgagttcaccctgaccatctctggtctgcagttcgacgacttcgctacctaccactgccagcactacgctggttactctgctaccttcggtcagggtacccgtgttgaaatcaaacgtaccgttgctgctccgtctgttttcatcttcccgccgtctgacgaacagctgaaatctggtaccgcttctgttgtttgcctgctgaacaacttctacccgcgtgaagctaaagttcagtggaaagttgacaacgctctgcagtctggtaactctcaggaatctgttaccgaacaggactctaaagactctacctactctctgtcttctaccctgaccctgtctaaagctgactacgaaaagcacaaagtttacgcttgcgaagttacccaccagggtctgtcttctccggttaccaaatctttcaaccgtggtgaatgctaattaattaataaggaggatataattatgaaaaagacagctatcgcgattgcagtggcactggctggtttcgctaccgtagcccaggcggccgcagaagttcagctggttgaatctggtggtggtctggttaaagctggtggttctctgatcctgtcttgcggtgtttctaacttccgtatctctgctcacaccatgaactgggttcgtcgtgttccgggtggtggtctggaatgggttgcttctatctctacctcttctacctaccgtgactacgctgacgctgttaaaggtcgtttcaccgtttctcgtgacgacctggaagacttcgtttacctgcagatgcataaaatgcgtgttgaagacaccgctatctactactgcgctcgtaaaggttctgaccgtctgtctgacaacgacccgttcgacgcttggggtccgggtaccgttgttaccgtttctccggcgtcgaccaaaggtccgtctgttttcccgctggctccgtcttctaaatctacctctggtggtaccgctgctctgggttgcctggttaaagactacttcccggaaccggttaccgtttcttggaactctggtgctctgacctctggtgttcacaccttcccggctgttctgcagtcttctggtctgtactctctgtcttctgttgttaccgttccgtcttcttctctgggtacccagacctacatctgcaacgttaaccacaaaccgtctaacaccaaagttgacaagaaagttgaaccgaaatcttgcctgcgatcgcggccaggccggccgcaccatcaccatcaccatggcgcatacccgtacgacgttccggactacgcttctactagttaggagggtggtggctctgagggtggcggttctgagggtggcggctctgagggaggcggttccggtggtggctctggttccggtgattttgattatgaaaagatggcaaacgctaataagggggctatgaccgaaaatgccgatgaaaacgcgctacagtctgacgctaaaggcaaacttgattctgtcgctactgattacggtgctgctatcgatggtttcattggtgacgtttccggccttgctaatggtaatggtgctactggtgattttgctggctctaattcccaaatggctcaagtcggtgacggtgataattcacctttaatgaataatttccgtcaatatttaccttccctccctcaatcggttgaatgtcgcccttttgtctttggcgctggtaaaccatatgaattttctattgattgtgacaaaataaacttattccgtggtgtctttgcgtttcttttatatgttgccacctttatgtatgtattttctacgtttgctaacatactgcgtaataaggagtcttaagctagctaacgatcgcccttcccaacagttgcgcagcctgaatggcgaatgggacgcgccctgtagcggcgcattaagcgcggcgggtgtggtggttacgcgcagcgtgaccgctacacttgccagcgccctagcgcccgctcctttcgctttcttcccttcctttctcgccacgttcgccggctttccccgtcaagctctaaatcgggggctccctttagggttccgatttagtgctttacggcacctcgaccccaaaaaacttgattagggtgatggttcacgtagtgggccatcgccctgatagacggtttttcgccctttgacgttggagtccacgttctttaatagtggactcttgttccaaactggaacaacactcaaccctatctcggtctattcttttgatttataagggattttgccgatttcggcctattggttaaaaaatgagctgatttaacaaaaatttaacgcgaattttaacaaaatattaacgcttacaatttag

SEQ ID NO: 7 - DNA, 645 bp, Artificial Sequence
  2G12 Fab light chain
gccggtgttgttatgacccagtctccgtctaccctgtctgcttctgttggtgacaccatcaccatcacctgccgtgcttctcagtctatcgaaacctggctggcttggtaccagcagaaaccgggtaaagctccgaaactgctgatctacaaggcttctaccctgaaaaccggtgttccgtctcgtttctctggttctggttctggtaccgagttcaccctgaccatctctggtctgcagttcgacgacttcgctacctaccactgccagcactacgctggttactctgctaccttcggtcagggtacccgtgttgaaatcaaacgtaccgttgctgctccgtctgttttcatcttcccgccgtctgacgaacagctgaaatctggtaccgcttctgttgtttgcctgctgaacaacttctacccgcgtgaagctaaagttcagtggaaagttgacaacgctctgcagtctggtaactctcaggaatctgttaccgaacaggactctaaagactctacctactctctgtcttctaccctgaccctgtctaaagctgactacgaaaagcacaaagtttacgcttgcgaagttacccaccagggtctgtcttctccggttaccaaatctttcaaccgtggtgaatgc

SEQ ID NO: 8 - DNA, 684 bp, Artificial Sequence
  2G12 Fab heavy chain
gaagttcagctggttgaatctggtggtggtctggttaaagctggtggttctctgatcctgtcttgcggtgtttctaacttccgtatctctgctcacaccatgaactgggttcgtcgtgttccgggtggtggtctggaatgggttgcttctatctctacctcttctacctaccgtgactacgctgacgctgttaaaggtcgtttcaccgtttctcgtgacgacctggaagacttcgtttacctgcagatgcataaaatgcgtgttgaagacaccgctatctactactgcgctcgtaaaggttctgaccgtctgtctgacaacgacccgttcgacgcttggggtccgggtaccgttgttaccgtttctccggcgtcgaccaaaggtccgtctgttttcccgctggctccgtcttctaaatctacctctggtggtaccgctgctctgggttgcctggttaaagactacttcccggaaccggttaccgtttcttggaactctggtgctctgacctctggtgttcacaccttcccggctgttctgcagtcttctggtctgtactctctgtcttctgttgttaccgttccgtcttcttctctgggtacccagacctacatctgcaacgttaaccacaaaccgtctaacaccaaagttgacaagaaagttgaaccgaaatcttgcctgcga

SEQ ID NO: 9 - protein, 9 aa, Artificial Sequence
  HA tag
YPYDVPDYA

SEQ ID NO: 10 - protein, 228 aa, Artificial Sequence
  2G12 Fab Heavy Chain
EVQLVESGGGLVKAGGSLILSCGVSNFRISAHTMNWVRRVPGGGLEWVASISTSSTYRDYADAVKGRFTVSRDDLEDFVYLQMHKMRVEDTAIYYCARKGSDRLSDNDPFDAWGPGTVVTVSPASTKGPSVFPLAPSSKSTSGGTAALGCLVKDYFPEPVTVSWNSGALTSGVHTFPAVLQSSGLYSLSSVVTVPSSSLGTQTYICNVNHKPSNTKVDKKVEPKSCLR

SEQ ID NO: 11 - protein, 215 aa, Artificial Sequence
  2G12 Fab Light Chain
AGVVMTQSPSTLSASVGDTITITCRASQSIETWLAWYQQKPGKAPKLLIYKASTLKTGVPSRFSGSGSGTEFTLTISGLQFDDFATYHCQHYAGYSATFGQGTRVEIKRTVAAPSVFIFPPSDEQLKSGTASVVCLLNNFYPREAKVQWKVDNALQSGNSQESVTEQDSKDSTYSLSSTLTLSKADYEKHKVYACEVTHQGLSSPVTKSFNRGEC

SEQ ID NO: 12 - DNA, 5882 bp, Artificial Sequence
  2G12 pCAL ITPO
gtggcacttttcggggaaatgtgcgcggaacccctatttgtttatttttctaaatacattcaaatatgtatccgctcatgagacaataaccctgataaatgcttcaataatattgaaaaaggaagagtatgagtattcaacatttccgtgtcgcccttattcccttttttgcggcattttgccttcctgtttttgctcacccagaaacgctggtgaaagtaaaagatgctgaagatcagttgggtgcacgagtgggttacatcgaactggatctcaacagcggtaagatccttgagagttttcgccccgaagaacgttttccaatgatgagcacttttaaagttctgctatgtggcgcggtattatcccgtattgacgccgggcaagagcaactcggtcgccgcatacactattctcagaatgacttggttgagtactcaccagtcacagaaaagcatcttacggatggcatgacagtaagagaattatgcagtgctgccataaccatgagtgataacactgcggccaacttacttctgacaacgatcggaggaccgaaggagctaaccgcttttttgcacaacatgggggatcatgtaactcgccttgatcgttgggaaccggagctgaatgaagccataccaaacgacgagcgtgacaccacgatgcctgtagcaatggcaacaacgttgcgcaaactattaactggcgaactacttactctagcttcccggcaacaattaatagactggatggaggcggataaagttgcaggaccacttctgcgctcggcccttccggctggctggtttattgctgataaatctggagccggtgagcgtgggtctcgcggtatcattgcagcactggggccagatggtaagccctcccgtatcgtagttatctacacgacggggagtcaggcaactatggatgaacgaaatagacagatcgctgagataggtgcctcactgattaagcattggtaactgtcagaccaagtttactcatatatactttagattgatttaaaacttcatttttaatttaaaaggatctaggtgaagatcctttttgataatctcatgaccaaaatcccttaacgtgagttttcgttccactgagcgtcagaccccgtagaaaagatcaaaggatcttcttgagatcctttttttctgcgcgtaatctgctgcttgcaaacaaaaaaaccaccgctaccagcggtggtttgtttgccggatcaagagctaccaactctttttccgaaggtaactggcttcagcagagcgcagataccaaatactgtccttctagtgtagccgtagttaggccaccacttcaagaactctgtagcaccgcctacatacctcgctctgctaatcctgttaccagtggctgctgccagtggcgataagtcgtgtcttaccgggttggactcaagacgatagttaccggataaggcgcagcggtcgggctgaacggggggttcgtgcacacagcccagcttggagcgaacgacctacaccgaactgagatacctacagcgtgagctatgagaaagcgccacgcttcccgaagggagaaaggcggacaggtatccggtaagcggcagggtcggaacaggagagcgcacgagggagcttccagggggaaacgcctggtatctttatagtcctgtcgggtttcgccacctctgacttgagcgtcgatttttgtgatgctcgtcaggggggcggagcctatggaaaaacgccagcaacgcggcctttttacggttcctggccttttgctggccttttgctcacatgttctttcctgcgttatcccctgattctgtggataaccgtattaccgcctttgagtgagctgataccgctcgccgcagccgaacgaccgagcgcagcgagtcagtgagcgaggaagcgacaccatcgaatggcgcaaaacctttcgcggtatggcatgatagcgcccggaagagagtcaattcagggtggtgaatgtgaaaccagtaacgttatacgatgtcgcagagtatgccggtgtctcttatcagaccgtttcccgcgtggtgaaccaggccagccacgtttctgcgaaaacgcgggaaaaagtggaagcggcgatggcggagctgaattacattcccaaccgcgtggcacaacaactggcgggcaaacagtcgttgctgattggcgttgccacctccagtctggccctgcacgcgccgtcgcaaattgtcgcggcgattaaatctcgcgccgatcaactgggtgccagcgtggtggtgtcgatggtagaacgaagcggcgtcgaagcctgtaaagcggcggtgcacaatcttctcgcgcaacgcgtcagtgggctgatcattaactatccgctggatgaccaggatgccattgctgtggaagctgcctgcactaatgttccggcgttatttcttgatgtctctgaccagacacccatcaacagtattattttctcccatgaagacggtacgcgactgggcgtggagcatctggtcgcattgggtcaccagcaaatcgcgctgttagcgggcccattaagttctgtctcggcgcgtctgcgtctggctggctggcataaatatctcactcgcaatcaaattcagccgatagcggaacgggaaggcgactggagtgccatgtccggttttcaacaaaccatgcaaatgctgaatgagggcatcgttcccactgcgatgctggttgccaacgatcagatggcgctgggcgcaatgcgcgccattaccgagtccgggctgcgcgttggtgcggatatctcggtagtgggatacgacgataccgaagacagctcatgttatatcccgccgttaaccaccatcaaacaggattttcgcctgctggggcaaaccagcgtggaccgcttgctgcaactctctcagggccaggcggtgaagggcaatcagctgttgcccgtctcactggtgaaaagaaaaaccaccctggcgcccaatacgcaaaccgcctctccccgcgcgttggccgattcattaatgcagctggcacgacaggtttcccgactggaaagcgggcagtgagcggtacccgataaaagcggcttcctgacaggaggccgttttgttttgcagcccacctcaacgcaattaatgtgagttagctcactcattaggcaccccaggctttacactttatgcttccggctcgtatgttgtgtggaattgtgagcggataacaattgaattaaggaggatataattatgaaatacctgctgccgaccgcagccgctggtctgctgctgctcgcggcccagccggccatggccgccggtgttgttatgacccagtctccgtctaccctgtctgcttctgttggtgacaccatcaccatcacctgccgtgcttctcagtctatcgaaacctggctggcttggtaccagcagaaaccgggtaaagctccgaaactgctgatctacaaggcttctaccctgaaaaccggtgttccgtctcgtttctctggttctggttctggtaccgagttcaccctgaccatctctggtctgcagttcgacgacttcgctacctaccactgccagcactacgctggttactctgctaccttcggtcagggtacccgtgttgaaatcaaacgtaccgttgctgctccgtctgttttcatcttcccgccgtctgacgaacagctgaaatctggtaccgcttctgttgtttgcctgctgaacaacttctacccgcgtgaagctaaagttcagtggaaagttgacaacgctctgcagtctggtaactctcaggaatctgttaccgaacaggactctaaagactctacctactctctgtcttctaccctgaccctgtctaaagctgactacgaaaagcacaaagtttacgcttgcgaagttacccaccagggtctgtcttctccggttaccaaatctttcaaccgtggtgaatgctaattaattaataaggaggatataattatgaaaaagacagctatcgcgattgcagtggcactggctggtttcgctaccgtagcccaggcggccgcagaagttcagctggttgaatctggtggtggtctggttaaagctggtggttctctgatcctgtcttgcggtgtttctaacttccgtatctctgctcacaccatgaactgggttcgtcgtgttccgggtggtggtctggaatgggttgcttctatctctacctcttctacctaccgtgactacgctgacgctgttaaaggtcgtttcaccgtttctcgtgacgacctggaagacttcgtttacctgcagatgcataaaatgcgtgttgaagacaccgctatctactactgcgctcgtaaaggttctgaccgtctgtctgacaacgacccgttcgacgcttggggtccgggtaccgttgttaccgtttctccggcgtcgaccaaaggtccgtctgttttcccgctggctccgtcttctaaatctacctctggtggtaccgctgctctgggttgcctggttaaagactacttcccggaaccggttaccgtttcttggaactctggtgctctgacctctggtgttcacaccttcccggctgttctgcagtcttctggtctgtactctctgtcttctgttgttaccgttccgtcttcttctctgggtacccagacctacatctgcaacgttaaccacaaaccgtctaacaccaaagttgacaagaaagttgaaccgaaatcttgcctgcgatcgcggccaggccggccgcaccatcaccatcaccatggcgcatacccgtacgacgttccggactacgcttctactagttaggagggtggtggctctgagggtggcggttctgagggtggcggctctgagggaggcggttccggtggtggctctggttccggtgattttgattatgaaaagatggcaaacgctaataagggggctatgaccgaaaatgccgatgaaaacgcgctacagtctgacgctaaaggcaaacttgattctgtcgctactgattacggtgctgctatcgatggtttcattggtgacgtttccggccttgctaatggtaatggtgctactggtgattttgctggctctaattcccaaatggctcaagtcggtgacggtgataattcacctttaatgaataatttccgtcaatatttaccttccctccctcaatcggttgaatgtcgcccttttgtctttggcgctggtaaaccatatgaattttctattgattgtgacaaaataaacttattccgtggtgtctttgcgtttcttttatatgttgccacctttatgtatgtattttctacgtttgctaacatactgcgtaataaggagtcttaagctagctaacgatcgcccttcccaacagttgcgcagcctgaatggcgaatgggacgcgccctgtagcggcgcattaagcgcggcgggtgtggtggttacgcgcagcgtgaccgctacacttgccagcgccctagcgcccgctcctttcgctttcttcccttcctttctcgccacgttcgccggctttccccgtcaagctctaaatcgggggctccctttagggttccgatttagtgctttacggcacctcgaccccaaaaaacttgattagggtgatggttcacgtagtgggccatcgccctgatagacggtttttcgccctttgacgttggagtccacgttctttaatagtggactcttgttccaaactggaacaacactcaaccctatctcggtctattcttttgatttataagggattttgccgatttcggcctattggttaaaaaatgagctgatttaacaaaaatttaacgcgaattttaacaaaatattaacgcttacaatttag

SEQ ID NO: 13 - DNA, 41 bp, Artificial Sequence
  2G12LCF primer
gccgctgtgccatcgctcagtaacaattgaattaaggagga

SEQ ID NO: 14 - DNA, 20 bp, Artificial Sequence
  L3R primer
atagtgctggcagtggtagg

SEQ ID NO: 15 - DNA, 55 bp, Artificial Sequence
  2G12 reference sequence
ctacctaccactgccagcactacgctggttactctgctaccttcggtcagggtac

SEQ ID NO: 16 - DNA, 55 bp, Artificial Sequence
  AGYS primer
  variation 24-25, 27-28, 30-31, 33-34: n = a, g, c or t
  variation 26, 29, 32, 35: k = g or t
ctacctaccactgccagcactatnnknnknnknnkgctaccttcggtcagggtac

SEQ ID NO: 17 - DNA, 58 bp, Artificial Sequence
  AGYS+1 primer
  variation 24-25, 27-28, 30-31, 33-34, 36-37: n = a, c, g or t
  variation 26, 29, 32, 35, 38: k = g or t
ctacctaccactgccagcactatnnknnknnknnknnkgctaccttcggtcagggtac

SEQ ID NO: 18 - DNA, 61 bp, Artificial Sequence
  AGYS+2 primer
  variation 24-25, 27-28, 30-31, 33-34, 36-37, 39-40: n = a, c, t, or g
  variation 26, 29, 32, 35, 38, 41: k = g or t
ctacctaccactgccagcactatnnknnknnknnknnknnkgctaccttcggtcagggtac

SEQ ID NO: 19 - DNA, 48 bp, Artificial Sequence
  2G12LCR primer
gccgctgtgccatcgctcagtaacttaattaattagcattcaccacgg

SEQ ID NO: 20 - DNA, 6 bp, Artificial Sequence
  MfeI restriction site
caattg

SEQ ID NO: 21 - DNA, 24 bp, Artificial Sequence
  CALX24 primer
gccgctgtgccatcgctcagtaac

SEQ ID NO: 22 - DNA, 8 bp, Artificial Sequence
  PacI restriction site
ttaattaa

SEQ ID NO: 23 - DNA, 5882 bp, Artificial Sequence
  2G12 3ALA LC pCAL IT* (contains 3-Ala CDRL3)
gtggcacttttcggggaaatgtgcgcggaacccctatttgtttatttttctaaatacattcaaatatgtatccgctcatgagacaataaccctgataaatgcttcaataatattgaaaaaggaagagtatgagtattcaacatttccgtgtcgcccttattcccttttttgcggcattttgccttcctgtttttgctcacccagaaacgctggtgaaagtaaaagatgctgaagatcagttgggtgcacgagtgggttacatcgaactggatctcaacagcggtaagatccttgagagttttcgccccgaagaacgttttccaatgatgagcacttttaaagttctgctatgtggcgcggtattatcccgtattgacgccgggcaagagcaactcggtcgccgcatacactattctcagaatgacttggttgagtactcaccagtcacagaaaagcatcttacggatggcatgacagtaagagaattatgcagtgctgccataaccatgagtgataacactgcggccaacttacttctgacaacgatcggaggaccgaaggagctaaccgcttttttgcacaacatgggggatcatgtaactcgccttgatcgttgggaaccggagctgaatgaagccataccaaacgacgagcgtgacaccacgatgcctgtagcaatggcaacaacgttgcgcaaactattaactggcgaactacttactctagcttcccggcaacaattaatagactggatggaggcggataaagttgcaggaccacttctgcgctcggcccttccggctggctggtttattgctgataaatctggagccggtgagcgtgggtctcgcggtatcattgcagcactggggccagatggtaagccctcccgtatcgtagttatctacacgacggggagtcaggcaactatggatgaacgaaatagacagatcgctgagataggtgcctcactgattaagcattggtaactgtcagaccaagtttactcatatatactttagattgatttaaaacttcatttttaatttaaaaggatctaggtgaagatcctttttgataatctcatgaccaaaatcccttaacgtgagttttcgttccactgagcgtcagaccccgtagaaaagatcaaaggatcttcttgagatcctttttttctgcgcgtaatctgctgcttgcaaacaaaaaaaccaccgctaccagcggtggtttgtttgccggatcaagagctaccaactctttttccgaaggtaactggcttcagcagagcgcagataccaaatactgtccttctagtgtagccgtagttaggccaccacttcaagaactctgtagcaccgcctacatacctcgctctgctaatcctgttaccagtggctgctgccagtggcgataagtcgtgtcttaccgggttggactcaagacgatagttaccggataaggcgcagcggtcgggctgaacggggggttcgtgcacacagcccagcttggagcgaacgacctacaccgaactgagatacctacagcgtgagctatgagaaagcgccacgcttcccgaagggagaaaggcggacaggtatccggtaagcggcagggtcggaacaggagagcgcacgagggagcttccagggggaaacgcctggtatctttatagtcctgtcgggtttcgccacctctgacttgagcgtcgatttttgtgatgctcgtcaggggggcggagcctatggaaaaacgccagcaacgcggcctttttacggttcctggccttttgctggccttttgctcacatgttctttcctgcgttatcccctgattctgtggataaccgtattaccgcctttgagtgagctgataccgctcgccgcagccgaacgaccgagcgcagcgagtcagtgagcgaggaagcgacaccatcgaatggcgcaaaacctttcgcggtatggcatgatagcgcccggaagagagtcaattcagggtggtgaatgtgaaaccagtaacgttatacgatgtcgcagagtatgccggtgtctcttatcagaccgtttcccgcgtggtgaaccaggccagccacgtttctgcgaaaacgcgggaaaaagtggaagcggcgatggcggagctgaattacattcccaaccgcgtggcacaacaactggcgggcaaacagtcgttgctgattggcgttgccacctccagtctggccctgcacgcgccgtcgcaaattgtcgcggcgattaaatctcgcgccgatcaactgggtgccagcgtggtggtgtcgatggtagaacgaagcggcgtcgaagcctgtaaagcggcggtgcacaatcttctcgcgcaacgcgtcagtgggctgatcattaactatccgctggatgaccaggatgccattgctgtggaagctgcctgcactaatgttccggcgttatttcttgatgtctctgaccagacacccatcaacagtattattttctcccatgaagacggtacgcgactgggcgtggagcatctggtcgcattgggtcaccagcaaatcgcgctgttagcgggcccattaagttctgtctcggcgcgtctgcgtctggctggctggcataaatatctcactcgcaatcaaattcagccgatagcggaacgggaaggcgactggagtgccatgtccggttttcaacaaaccatgcaaatgctgaatgagggcatcgttcccactgcgatgctggttgccaacgatcagatggcgctgggcgcaatgcgcgccattaccgagtccgggctgcgcgttggtgcggatatctcggtagtgggatacgacgataccgaagacagctcatgttatatcccgccgttaaccaccatcaaacaggattttcgcctgctggggcaaaccagcgtggaccgcttgctgcaactctctcagggccaggcggtgaagggcaatcagctgttgcccgtctcactggtgaaaagaaaaaccaccctggcgcccaatacgcaaaccgcctctccccgcgcgttggccgattcattaatgcagctggcacgacaggtttcccgactggaaagcgggcagtgagcggtacccgataaaagcggcttcctgacaggaggccgttttgttttgcagcccacctcaacgcaattaatgtgagttagctcactcattaggcaccccaggctttacactttatgcttccggctcgtatgttgtgtggaattgtgagcggataacaattgaattaaggaggatataattatgaaatacctgctgccgaccgcagccgctggtctgctgctgctcgcggcctagccggccatggccgccggtgttgttatgacccagtctccgtctaccctgtctgcttctgttggtgacaccatcaccatcacctgccgtgcttctcagtctatcgaaacctggctggcttggtaccagcagaaaccgggtaaagctccgaaactgctgatctacaaggcttctaccctgaaaaccggtgttccgtctcgtttctctggttctggttctggtaccgagttcaccctgaccatctctggtctgcagttcgacgacttcgctacctaccactgccagcacgccgcgggtgcggccgcgaccttcggtcagggtacccgtgttgaaatcaaacgtaccgttgctgctccgtctgttttcatcttcccgccgtctgacgaacagctgaaatctggtaccgcttctgttgtttgcctgctgaacaacttctacccgcgtgaagctaaagttcagtggaaagttgacaacgctctgcagtctggtaactctcaggaatctgttaccgaacaggactctaaagactctacctactctctgtcttctaccctgaccctgtctaaagctgactacgaaaagcacaaagtttacgcttgcgaagttacccaccagggtctgtcttctccggttaccaaatctttcaaccgtggtgaatgctaattaattaataaggaggatataattatgaaaaagacagctatcgcgattgcagtggcactggctggtttcgctaccgtagcctaggcggccgcagaagttcagctggttgaatctggtggtggtctggttaaagctggtggttctctgatcctgtcttgcggtgtttctaacttccgtatctctgctcacaccatgaactgggttcgtcgtgttccgggtggtggtctggaatgggttgcttctatctctacctcttctacctaccgtgactacgctgacgctgttaaaggtcgtttcaccgtttctcgtgacgacctggaagacttcgtttacctgcagatgcataaaatgcgtgttgaagacaccgctatctactactgcgctcgtaaaggttctgaccgtctgtctgacaacgacccgttcgacgcttggggtccgggtaccgttgttaccgtttctccggcgtcgaccaaaggtccgtctgttttcccgctggctccgtcttctaaatctacctctggtggtaccgctgctctgggttgcctggttaaagactacttcccggaaccggttaccgtttcttggaactctggtgctctgacctctggtgttcacaccttcccggctgttctgcagtcttctggtctgtactctctgtcttctgttgttaccgttccgtcttcttctctgggtacccagacctacatctgcaacgttaaccacaaaccgtctaacaccaaagttgacaagaaagttgaaccgaaatcttgcctgcgatcgcggccaggccggccgcaccatcaccatcaccatggcgcatacccgtacgacgttccggactacgcttctactagttaggagggtggtggctctgagggtggcggttctgagggtggcggctctgagggaggcggttccggtggtggctctggttccggtgattttgattatgaaaagatggcaaacgctaataagggggctatgaccgaaaatgccgatgaaaacgcgctacagtctgacgctaaaggcaaacttgattctgtcgctactgattacggtgctgctatcgatggtttcattggtgacgtttccggccttgctaatggtaatggtgctactggtgattttgctggctctaattcccaaatggctcaagtcggtgacggtgataattcacctttaatgaataatttccgtcaatatttaccttccctccctcaatcggttgaatgtcgcccttttgtctttggcgctggtaaaccatatgaattttctattgattgtgacaaaataaacttattccgtggtgtctttgcgtttcttttatatgttgccacctttatgtatgtattttctacgtttgctaacatactgcgtaataaggagtcttaagctagctaacgatcgcccttcccaacagttgcgcagcctgaatggcgaatgggacgcgccctgtagcggcgcattaagcgcggcgggtgtggtggttacgcgcagcgtgaccgctacacttgccagcgccctagcgcccgctcctttcgctttcttcccttcctttctcgccacgttcgccggctttccccgtcaagctctaaatcgggggctccctttagggttccgatttagtgctttacggcacctcgaccccaaaaaacttgattagggtgatggttcacgtagtgggccatcgccctgatagacggtttttcgccctttgacgttggagtccacgttctttaatagtggactcttgttccaaactggaacaacactcaaccctatctcggtctattcttttgatttataagggattttgccgatttcggcctattggttaaaaaatgagctgatttaacaaaaatttaacgcgaattttaacaaaatattaacgcttacaatttag

SEQ ID NO: 24 - DNA, 34 bp, Artificial Sequence
  L1R primer
gggcggcgctcttcgtagcgaagtcgtcgaactg

SEQ ID NO: 25 - DNA, 55 bp, Artificial Sequence
  SYGA primer
  variation 25-26, 28-29, 31-32, 34-35: n = a, c, g or t
  variation 24, 27, 30, 33: m = a or c
cgggtaccctgaccgaaggtagcmnnmnnmnnmnnatagtgctggcagtggtagg

SEQ ID NO: 26 - DNA, 58 bp, Artificial Sequence
  SYGA+1 primer
  variation 25-26, 28-29, 31-32, 34-35, 37-38: n = a, c, t, or g
  variation 24, 27, 30, 33, 36: m = a or c
cgggtaccctgaccgaaggtagcmnnmnnmnnmnnmnnatagtgctggcagtggtagg

SEQ ID NO: 27 - DNA, 61 bp, Artificial Sequence
  SYGA+2 primer
  variation 25-26, 28-29, 31-32, 34-35, 37-38, 40-41: n = a, c, t or g
  variation 24, 27, 30, 33, 36, 39: m = a or c
cgggtaccctgaccgaaggtagcmnnmnnmnnmnnmnnmnnatagtgctggcagtggtagg

SEQ ID NO: 28 - DNA, 34 bp, Artificial Sequence
  L2F primer
gggcggcgctcttccccgtgttgaaatcaaacgt

SEQ ID NO: 29 - DNA, 8 bp, Artificial Sequence
  SapI restriction site
  variation 8: n = a or c or g or t
gctcttcn

SEQ ID NO: 30 - protein, 9 aa, Artificial Sequence
  anti-C. albicans 2G12 variant CDRL3
QHYKEWRAT

SEQ ID NO: 31 - protein, 9 aa, Artificial Sequence
  anti-C. albicans 2G12 variant CDRL3
QHYKEWSAT

SEQ ID NO: 32 - protein, 9 aa, Artificial Sequence
  anti-C. albicans 2G12 variant CDRL3
QHYREWSAT

SEQ ID NO: 33 - protein, 9 aa, Artificial Sequence
  anti-C. albicans 2G12 variant CDRL3
QHYLAWSAT

SEQ ID NO: 34 - protein, 9 aa, Artificial Sequence
  anti-C. albicans 2G12 variant CDRL3
QHYKEWWAT

SEQ ID NO: 35 - protein, 9 aa, Artificial Sequence
  anti-C. albicans 2G12 variant CDRL3
QHYREWWAT

SEQ ID NO: 36 - protein, 9 aa, Artificial Sequence
  anti-C. albicans 2G12 variant CDRL3
QHYLSWSAT

SEQ ID NO: 37 - protein, 9 aa, Artificial Sequence
  anti-C. albicans 2G12 variant CDRL3
QHYKPFNAT

SEQ ID NO: 38 - protein, 9 aa, Artificial Sequence
  anti-C. albicans 2G12 variant CDRL3
QHYRPFNAT

SEQ ID NO: 39 - protein, 9 aa, Artificial Sequence
  anti-C. albicans 2G12 variant CDRL3
QHYMPFNAT

SEQ ID NO: 40 - protein, 9 aa, Artificial Sequence
  anti-C. albicans 2G12 variant CDRL3
QHYQPFNAT

SEQ ID NO: 41 - protein, 9 aa, Artificial Sequence
  anti-C. albicans 2G12 variant CDRL3
QHYLPFNAT

SEQ ID NO: 42 - protein, 9 aa, Artificial Sequence
  anti-C. albicans 2G12 variant CDRL3
QHYEPFNAT

SEQ ID NO: 43 - protein, 9 aa, Artificial Sequence
  anti-C. albicans 2G12 variant CDRL3
QHYKPFEAT

SEQ ID NO: 44 - protein, 9 aa, Artificial Sequence
  anti-C. albicans 2G12 variant CDRL3
QHYRPFEAT

SEQ ID NO: 45 - protein, 9 aa, Artificial Sequence
  anti-C. albicans 2G12 variant CDRL3
QHYKPFQAT

SEQ ID NO: 46 - protein, 9 aa, Artificial Sequence
  anti-C. albicans 2G12 variant CDRL3
QHYRPFQAT

SEQ ID NO: 47 - protein, 9 aa, Artificial Sequence
  anti-C. albicans 2G12 variant CDRL3
QHYQPFQAT

SEQ ID NO: 48 - protein, 9 aa, Artificial Sequence
  anti-C. albicans 2G12 variant CDRL3
QHYIPFQAT

SEQ ID NO: 49 - protein, 9 aa, Artificial Sequence
  anti-C. albicans 2G12 variant CDRL3
QHYKPFSAS

SEQ ID NO: 50 - protein, 9 aa, Artificial Sequence
  anti-C. albicans 2G12 variant CDRL3
QHYRPFSAT

SEQ ID NO: 51 - protein, 9 aa, Artificial Sequence
  anti-C. albicans 2G12 variant CDRL3
QHYQPFSAT

SEQ ID NO: 52 - protein, 9 aa, Artificial Sequence
  anti-C. albicans 2G12 variant CDRL3
QHYVPFSAT

SEQ ID NO: 53 - protein, 9 aa, Artificial Sequence
  anti-C. albicans 2G12 variant CDRL3
QHYHPFSAT

SEQ ID NO: 54 - protein, 9 aa, Artificial Sequence
  anti-C. albicans 2G12 variant CDRL3
QHYKPFHAT

SEQ ID NO: 55 - protein, 9 aa, Artificial Sequence
  anti-C. albicans 2G12 variant CDRL3
QHYRPFHAT

SEQ ID NO: 56 - protein, 9 aa, Artificial Sequence
  anti-C. albicans 2G12 variant CDRL3
QHYMPFHAT

SEQ ID NO: 57 - protein, 9 aa, Artificial Sequence
  anti-C. albicans 2G12 variant CDRL3
QHYEPFHAT

SEQ ID NO: 58 - protein, 9 aa, Artificial Sequence
  anti-C. albicans 2G12 variant CDRL3
QHYKPFRAT

SEQ ID NO: 59 - protein, 9 aa, Artificial Sequence
  anti-C. albicans 2G12 variant CDRL3
QHYVPFRAT

SEQ ID NO: 60 - protein, 9 aa, Artificial Sequence
  anti-C. albicans 2G12 variant CDRL3
QHYEPFRAT

SEQ ID NO: 61 - protein, 9 aa, Artificial Sequence
  anti-C. albicans 2G12 variant CDRL3
QHYKPFAAT

SEQ ID NO: 62 - protein, 9 aa, Artificial Sequence
  anti-C. albicans 2G12 variant CDRL3
QHYVPFAAT

SEQ ID NO: 63 - protein, 9 aa, Artificial Sequence
  anti-C. albicans 2G12 variant CDRL3
QHYIPFAAT

SEQ ID NO: 64 - protein, 9 aa, Artificial Sequence
  anti-C. albicans 2G12 variant CDRL3
QHYKPFDAT

SEQ ID NO: 65 - protein, 9 aa, Artificial Sequence
  anti-C. albicans 2G12 variant CDRL3
QHYMPFDAT

SEQ ID NO: 66 - protein, 9 aa, Artificial Sequence
  anti-C. albicans 2G12 variant CDRL3
QHYMPFKAT

SEQ ID NO: 67 - protein, 9 aa, Artificial Sequence
  anti-C. albicans 2G12 variant CDRL3
QHYMPFTAT

SEQ ID NO: 68 - protein, 9 aa, Artificial Sequence
  anti-C. albicans 2G12 variant CDRL3
QHYMPFPAT

SEQ ID NO: 69 - protein, 9 aa, Artificial Sequence
  anti-C. albicans 2G12 variant CDRL3
QHYQPFWAT

SEQ ID NO: 70 - protein, 9 aa, Artificial Sequence
  anti-C. albicans 2G12 variant CDRL3
QHYSPFWAT

SEQ ID NO: 71 - protein, 9 aa, Artificial Sequence
  anti-C. albicans 2G12 variant CDRL3
QHYMPYRAS

SEQ ID NO: 72 - protein, 9 aa, Artificial Sequence
  anti-C. albicans 2G12 variant CDRL3
QHYKPYRAT

SEQ ID NO: 73 - protein, 9 aa, Artificial Sequence
  anti-C. albicans 2G12 variant CDRL3
QHYMPYRAT

SEQ ID NO: 74 - protein, 9 aa, Artificial Sequence
  anti-C. albicans 2G12 variant CDRL3
QHYQPYRAT

SEQ ID NO: 75 - protein, 9 aa, Artificial Sequence
  anti-C. albicans 2G12 variant CDRL3
QHYLPYRAT

SEQ ID NO: 76 - protein, 9 aa, Artificial Sequence
  anti-C. albicans 2G12 variant CDRL3
QHYEPYRAT

SEQ ID NO: 77 - protein, 9 aa, Artificial Sequence
  anti-C. albicans 2G12 variant CDRL3
QHYKPYDAT

SEQ ID NO: 78 - protein, 9 aa, Artificial Sequence
  anti-C. albicans 2G12 variant CDRL3
QHYKPYSAT

SEQ ID NO: 79 - protein, 9 aa, Artificial Sequence
  anti-C. albicans 2G12 variant CDRL3
QHYQPYVAT

SEQ ID NO: 80 - protein, 9 aa, Artificial Sequence
  anti-C. albicans 2G12 variant CDRL3
QHYEPYKAT

SEQ ID NO: 81 - protein, 9 aa, Artificial Sequence
  anti-C. albicans 2G12 variant CDRL3
QHYLPYQAS

SEQ ID NO: 82 - protein, 10 aa, Artificial Sequence
  anti-C. albicans 2G12 variant CDRL3
QHYRPHTGAT

SEQ ID NO: 83 - protein, 10 aa, Artificial Sequence
  anti-C. albicans 2G12 variant CDRL3
QHYTAHDGAT

SEQ ID NO: 84 - protein, 10 aa, Artificial Sequence
  anti-C. albicans 2G12 variant CDRL3
QHYTAHRGAT

SEQ ID NO: 85 - protein, 10 aa, Artificial Sequence
  anti-C. albicans 2G12 variant CDRL3
QHYRAHTGAT

SEQ ID NO: 86 - protein, 10 aa, Artificial Sequence
  anti-C. albicans 2G12 variant CDRL3
QHYTAHTGAT

SEQ ID NO: 87 - protein, 10 aa, Artificial Sequence
  anti-C. albicans 2G12 variant CDRL3
QHYTDHHGAT

SEQ ID NO: 88 - protein, 10 aa, Artificial Sequence
  anti-C. albicans 2G12 variant CDRL3
QHYTDHKGAT

SEQ ID NO: 89 - protein, 10 aa, Artificial Sequence
  anti-C. albicans 2G12 variant CDRL3
QHYTDHRGAT

SEQ ID NO: 90 - protein, 10 aa, Artificial Sequence
  anti-C. albicans 2G12 variant CDRL3
QHYTDHYGAT

SEQ ID NO: 91 - protein, 215 aa, Artificial Sequence
  anti-C. albicans 2G12 light chain variant
AGVVMTQSPSTLSASVGDTITITCRASQSIETWLAWYQQKPGKAPKLLIYKASTLKTGVPSRFSGSGSGTEFTLTISGLQFDDFATYHCQHYKEWRATFGQGTRVEIKRTVAAPSVFIFPPSDEQLKSGTASVVCLLNNFYPREAKVQWKVDNALQSGNSQESVTEQDSKDSTYSLSSTLTLSKADYEKHKVYACEVTHQGLSSPVTKSFNRGEC

SEQ ID NO: 92 - protein, 215 aa, Artificial Sequence
  anti-C. albicans 2G12 light chain variant
AGVVMTQSPSTLSASVGDTITITCRASQSIETWLAWYQQKPGKAPKLLIYKASTLKTGVPSRFSGSGSGTEFTLTISGLQFDDFATYHCQHYKEWSATFGQGTRVEIKRTVAAPSVFIFPPSDEQLKSGTASVVCLLNNFYPREAKVQWKVDNALQSGNSQESVTEQDSKDSTYSLSSTLTLSKADYEKHKVYACEVTHQGLSSPVTKSFNRGEC

SEQ ID NO: 93 - protein, 215 aa, Artificial Sequence
  anti-C. albicans 2G12 light chain variant
AGVVMTQSPSTLSASVGDTITITCRASQSIETWLAWYQQKPGKAPKLLIYKASTLKTGVPSRFSGSGSGTEFTLTISGLQFDDFATYHCQHYREWSATFGQGTRVEIKRTVAAPSVFIFPPSDEQLKSGTASVVCLLNNFYPREAKVQWKVDNALQSGNSQESVTEQDSKDSTYSLSSTLTLSKADYEKHKVYACEVTHQGLSSPVTKSFNRGEC

SEQ ID NO: 94 - protein, 215 aa, Artificial Sequence
  anti-C. albicans 2G12 light chain variant
AGVVMTQSPSTLSASVGDTITITCRASQSIETWLAWYQQKPGKAPKLLIYKASTLKTGVPSRFSGSGSGTEFTLTISGLQFDDFATYHCQHYLAWSATFGQGTRVEIKRTVAAPSVFIFPPSDEQLKSGTASVVCLLNNFYPREAKVQWKVDNALQSGNSQESVTEQDSKDSTYSLSSTLTLSKADYEKHKVYACEVTHQGLSSPVTKSFNRGEC

SEQ ID NO: 95 - protein, 215 aa, Artificial Sequence
  anti-C. albicans 2G12 light chain variant
AGVVMTQSPSTLSASVGDTITITCRASQSIETWLAWYQQKPGKAPKLLIYKASTLKTGVPSRFSGSGSGTEFTLTISGLQFDDFATYHCQHYKEWWATFGQGTRVEIKRTVAAPSVFIFPPSDEQLKSGTASVVCLLNNFYPREAKVQWKVDNALQSGNSQESVTEQDSKDSTYSLSSTLTLSKADYEKHKVYACEVTHQGLSSPVTKSFNRGEC

SEQ ID NO: 96 - protein, 215 aa, Artificial Sequence
  anti-C. albicans 2G12 light chain variant
AGVVMTQSPSTLSASVGDTITITCRASQSIETWLAWYQQKPGKAPKLLIYKASTLKTGVPSRFSGSGSGTEFTLTISGLQFDDFATYHCQHYREWWATFGQGTRVEIKRTVAAPSVFIFPPSDEQLKSGTASVVCLLNNFYPREAKVQWKVDNALQSGNSQESVTEQDSKDSTYSLSSTLTLSKADYEKHKVYACEVTHQGLSSPVTKSFNRGEC

SEQ ID NO: 97 - protein, 215 aa, Artificial Sequence
  anti-C. albicans 2G12 light chain variant
AGVVMTQSPSTLSASVGDTITITCRASQSIETWLAWYQQKPGKAPKLLIYKASTLKTGVPSRFSGSGSGTEFTLTISGLQFDDFATYHCQHYLSWSATFGQGTRVEIKRTVAAPSVFIFPPSDEQLKSGTASVVCLLNNFYPREAKVQWKVDNALQSGNSQESVTEQDSKDSTYSLSSTLTLSKADYEKHKVYACEVTHQGLSSPVTKSFNRGEC

SEQ ID NO: 98 - protein, 215 aa, Artificial Sequence
  anti-C. albicans 2G12 light chain variant
AGVVMTQSPSTLSASVGDTITITCRASQSIETWLAWYQQKPGKAPKLLIYKASTLKTGVPSRFSGSGSGTEFTLTISGLQFDDFATYHCQHYKPFNATFGQGTRVEIKRTVAAPSVFIFPPSDEQLKSGTASVVCLLNNFYPREAKVQWKVDNALQSGNSQESVTEQDSKDSTYSLSSTLTLSKADYEKHKVYACEVTHQGLSSPVTKSFNRGEC

SEQ ID NO: 99 - protein, 215 aa, Artificial Sequence
  anti-C. albicans 2G12 light chain variant
AGVVMTQSPSTLSASVGDTITITCRASQSIETWLAWYQQKPGKAPKLLIYKASTLKTGVPSRFSGSGSGTEFTLTISGLQFDDFATYHCQHYRPFNATFGQGTRVEIKRTVAAPSVFIFPPSDEQLKSGTASVVCLLNNFYPREAKVQWKVDNALQSGNSQESVTEQDSKDSTYSLSSTLTLSKADYEKHKVYACEVTHQGLSSPVTKSFNRGEC

SEQ ID NO: 100 - protein, 215 aa, Artificial Sequence
  anti-C. albicans 2G12 light chain variant
AGVVMTQSPSTLSASVGDTITITCRASQSIETWLAWYQQKPGKAPKLLIYKASTLKTGVPSRFSGSGSGTEFTLTISGLQFDDFATYHCQHYMPFNATFGQGTRVEIKRTVAAPSVFIFPPSDEQLKSGTASVVCLLNNFYPREAKVQWKVDNALQSGNSQESVTEQDSKDSTYSLSSTLTLSKADYEKHKVYACEVTHQGLSSPVTKSFNRGEC

SEQ ID NO: 101 - protein, 215 aa, Artificial Sequence
  anti-C. albicans 2G12 light chain variant
AGVVMTQSPSTLSASVGDTITITCRASQSIETWLAWYQQKPGKAPKLLIYKASTLKTGVPSRFSGSGSGTEFTLTISGLQFDDFATYHCQHYQPFNATFGQGTRVEIKRTVAAPSVFIFPPSDEQLKSGTASVVCLLNNFYPREAKVQWKVDNALQSGNSQESVTEQDSKDSTYSLSSTLTLSKADYEKHKVYACEVTHQGLSSPVTKSFNRGEC

SEQ ID NO: 102 - protein, 215 aa, Artificial Sequence
  anti-C. albicans 2G12 light chain variant
AGVVMTQSPSTLSASVGDTITITCRASQSIETWLAWYQQKPGKAPKLLIYKASTLKTGVPSRFSGSGSGTEFTLTISGLQFDDFATYHCQHYLPFNATFGQGTRVEIKRTVAAPSVFIFPPSDEQLKSGTASVVCLLNNFYPREAKVQWKVDNALQSGNSQESVTEQDSKDSTYSLSSTLTLSKADYEKHKVYACEVTHQGLSSPVTKSFNRGEC

SEQ ID NO: 103 - protein, 215 aa, Artificial Sequence
  anti-C. albicans 2G12 light chain variant
AGVVMTQSPSTLSASVGDTITITCRASQSIETWLAWYQQKPGKAPKLLIYKASTLKTGVPSRFSGSGSGTEFTLTISGLQFDDFATYHCQHYEPFNATFGQGTRVEIKRTVAAPSVFIFPPSDEQLKSGTASVVCLLNNFYPREAKVQWKVDNALQSGNSQESVTEQDSKDSTYSLSSTLTLSKADYEKHKVYACEVTHQGLSSPVTKSFNRGEC

SEQ ID NO: 104 - protein, 215 aa, Artificial Sequence
  anti-C. albicans 2G12 light chain variant
AGVVMTQSPSTLSASVGDTITITCRASQSIETWLAWYQQKPGKAPKLLIYKASTLKTGVPSRFSGSGSGTEFTLTISGLQFDDFATYHCQHYKPFEATFGQGTRVEIKRTVAAPSVFIFPPSDEQLKSGTASVVCLLNNFYPREAKVQWKVDNALQSGNSQESVTEQDSKDSTYSLSSTLTLSKADYEKHKVYACEVTHQGLSSPVTKSFNRGEC

SEQ ID NO: 105 - protein, 215 aa, Artificial Sequence
  anti-C. albicans 2G12 light chain variant
AGVVMTQSPSTLSASVGDTITITCRASQSIETWLAWYQQKPGKAPKLLIYKASTLKTGVPSRFSGSGSGTEFTLTISGLQFDDFATYHCQHYRPFEATFGQGTRVEIKRTVAAPSVFIFPPSDEQLKSGTASVVCLLNNFYPREAKVQWKVDNALQSGNSQESVTEQDSKDSTYSLSSTLTLSKADYEKHKVYACEVTHQGLSSPVTKSFNRGEC

SEQ ID NO: 106 - protein, 215 aa, Artificial Sequence
  anti-C. albicans 2G12 light chain variant
AGVVMTQSPSTLSASVGDTITITCRASQSIETWLAWYQQKPGKAPKLLIYKASTLKTGVPSRFSGSGSGTEFTLTISGLQFDDFATYHCQHYKPFQATFGQGTRVEIKRTVAAPSVFIFPPSDEQLKSGTASVVCLLNNFYPREAKVQWKVDNALQSGNSQESVTEQDSKDSTYSLSSTLTLSKADYEKHKVYACEVTHQGLSSPVTKSFNRGEC

SEQ ID NO: 107 - protein, 215 aa, Artificial Sequence
  anti-C. albicans 2G12 light chain variant
AGVVMTQSPSTLSASVGDTITITCRASQSIETWLAWYQQKPGKAPKLLIYKASTLKTGVPSRFSGSGSGTEFTLTISGLQFDDFATYHCQHYRPFQATFGQGTRVEIKRTVAAPSVFIFPPSDEQLKSGTASVVCLLNNFYPREAKVQWKVDNALQSGNSQESVTEQDSKDSTYSLSSTLTLSKADYEKHKVYACEVTHQGLSSPVTKSFNRGEC

SEQ ID NO: 108 - protein, 215 aa, Artificial Sequence
  anti-C. albicans 2G12 light chain variant
AGVVMTQSPSTLSASVGDTITITCRASQSIETWLAWYQQKPGKAPKLLIYKASTLKTGVPSRFSGSGSGTEFTLTISGLQFDDFATYHCQHYQPFQATFGQGTRVEIKRTVAAPSVFIFPPSDEQLKSGTASVVCLLNNFYPREAKVQWKVDNALQSGNSQESVTEQDSKDSTYSLSSTLTLSKADYEKHKVYACEVTHQGLSSPVTKSFNRGEC

SEQ ID NO: 109 - protein, 215 aa, Artificial Sequence
  anti-C. albicans 2G12 light chain variant
AGVVMTQSPSTLSASVGDTITITCRASQSIETWLAWYQQKPGKAPKLLIYKASTLKTGVPSRFSGSGSGTEFTLTISGLQFDDFATYHCQHYIPFQATFGQGTRVEIKRTVAAPSVFIFPPSDEQLKSGTASVVCLLNNFYPREAKVQWKVDNALQSGNSQESVTEQDSKDSTYSLSSTLTLSKADYEKHKVYACEVTHQGLSSPVTKSFNRGEC

SEQ ID NO: 110 - protein, 215 aa, Artificial Sequence
  anti-C. albicans 2G12 light chain variant
AGVVMTQSPSTLSASVGDTITITCRASQSIETWLAWYQQKPGKAPKLLIYKASTLKTGVPSRFSGSGSGTEFTLTISGLQFDDFATYHCQHYKPFSASFGQGTRVEIKRTVAAPSVFIFPPSDEQLKSGTASVVCLLNNFYPREAKVQWKVDNALQSGNSQESVTEQDSKDSTYSLSSTLTLSKADYEKHKVYACEVTHQGLSSPVTKSFNRGEC

SEQ ID NO: 111 - protein, 215 aa, Artificial Sequence
  anti-C. albicans 2G12 light chain variant
AGVVMTQSPSTLSASVGDTITITCRASQSIETWLAWYQQKPGKAPKLLIYKASTLKTGVPSRFSGSGSGTEFTLTISGLQFDDFATYHCQHYRPFSATFGQGTRVEIKRTVAAPSVFIFPPSDEQLKSGTASVVCLLNNFYPREAKVQWKVDNALQSGNSQESVTEQDSKDSTYSLSSTLTLSKADYEKHKVYACEVTHQGLSSPVTKSFNRGEC

SEQ ID NO: 112 - protein, 215 aa, Artificial Sequence
  anti-C. albicans 2G12 light chain variant
AGVVMTQSPSTLSASVGDTITITCRASQSIETWLAWYQQKPGKAPKLLIYKASTLKTGVPSRFSGSGSGTEFTLTISGLQFDDFATYHCQHYQPFSATFGQGTRVEIKRTVAAPSVFIFPPSDEQLKSGTASVVCLLNNFYPREAKVQWKVDNALQSGNSQESVTEQDSKDSTYSLSSTLTLSKADYEKHKVYACEVTHQGLSSPVTKSFNRGEC

SEQ ID NO: 113 - protein, 215 aa, Artificial Sequence
  anti-C. albicans 2G12 light chain variant
AGVVMTQSPSTLSASVGDTITITCRASQSIETWLAWYQQKPGKAPKLLIYKASTLKTGVPSRFSGSGSGTEFTLTISGLQFDDFATYHCQHYVPFSATFGQGTRVEIKRTVAAPSVFIFPPSDEQLKSGTASVVCLLNNFYPREAKVQWKVDNALQSGNSQESVTEQDSKDSTYSLSSTLTLSKADYEKHKVYACEVTHQGLSSPVTKSFNRGEC

SEQ ID NO: 114 - protein, 215 aa, Artificial Sequence
  anti-C. albicans 2G12 light chain variant
AGVVMTQSPSTLSASVGDTITITCRASQSIETWLAWYQQKPGKAPKLLIYKASTLKTGVPSRFSGSGSGTEFTLTISGLQFDDFATYHCQHYHPFSATFGQGTRVEIKRTVAAPSVFIFPPSDEQLKSGTASVVCLLNNFYPREAKVQWKVDNALQSGNSQESVTEQDSKDSTYSLSSTLTLSKADYEKHKVYACEVTHQGLSSPVTKSFNRGEC

SEQ ID NO: 115 - protein, 215 aa, Artificial Sequence
  anti-C. albicans 2G12 light chain variant
AGVVMTQSPSTLSASVGDTITITCRASQSIETWLAWYQQKPGKAPKLLIYKASTLKTGVPSRFSGSGSGTEFTLTISGLQFDDFATYHCQHYKPFHATFGQGTRVEIKRTVAAPSVFIFPPSDEQLKSGTASVVCLLNNFYPREAKVQWKVDNALQSGNSQESVTEQDSKDSTYSLSSTLTLSKADYEKHKVYACEVTHQGLSSPVTKSFNRGEC

SEQ ID NO: 116 - protein, 215 aa, Artificial Sequence
  anti-C. albicans 2G12 light chain variant
AGVVMTQSPSTLSASVGDTITITCRASQSIETWLAWYQQKPGKAPKLLIYKASTLKTGVPSRFSGSGSGTEFTLTISGLQFDDFATYHCQHYRPFHATFGQGTRVEIKRTVAAPSVFIFPPSDEQLKSGTASVVCLLNNFYPREAKVQWKVDNALQSGNSQESVTEQDSKDSTYSLSSTLTLSKADYEKHKVYACEVTHQGLSSPVTKSFNRGEC

SEQ ID NO: 117 - protein, 215 aa, Artificial Sequence
  anti-C. albicans 2G12 light chain variant
AGVVMTQSPSTLSASVGDTITITCRASQSIETWLAWYQQKPGKAPKLLIYKASTLKTGVPSRFSGSGSGTEFTLTISGLQFDDFATYHCQHYMPFHATFGQGTRVEIKRTVAAPSVFIFPPSDEQLKSGTASVVCLLNNFYPREAKVQWKVDNALQSGNSQESVTEQDSKDSTYSLSSTLTLSKADYEKHKVYACEVTHQGLSSPVTKSFNRGEC

SEQ ID NO: 118 - protein, 215 aa, Artificial Sequence
  anti-C. albicans 2G12 light chain variant
AGVVMTQSPSTLSASVGDTITITCRASQSIETWLAWYQQKPGKAPKLLIYKASTLKTGVPSRFSGSGSGTEFTLTISGLQFDDFATYHCQHYEPFHATFGQGTRVEIKRTVAAPSVFIFPPSDEQLKSGTASVVCLLNNFYPREAKVQWKVDNALQSGNSQESVTEQDSKDSTYSLSSTLTLSKADYEKHKVYACEVTHQGLSSPVTKSFNRGEC

SEQ ID NO: 119 - protein, 215 aa, Artificial Sequence
  anti-C. albicans 2G12 light chain variant
AGVVMTQSPSTLSASVGDTITITCRASQSIETWLAWYQQKPGKAPKLLIYKASTLKTGVPSRFSGSGSGTEFTLTISGLQFDDFATYHCQHYKPFRATFGQGTRVEIKRTVAAPSVFIFPPSDEQLKSGTASVVCLLNNFYPREAKVQWKVDNALQSGNSQESVTEQDSKDSTYSLSSTLTLSKADYEKHKVYACEVTHQGLSSPVTKSFNRGEC

SEQ ID NO: 120 - protein, 215 aa, Artificial Sequence
  anti-C. albicans 2G12 light chain variant
AGVVMTQSPSTLSASVGDTITITCRASQSIETWLAWYQQKPGKAPKLLIYKASTLKTGVPSRFSGSGSGTEFTLTISGLQFDDFATYHCQHYVPFRATFGQGTRVEIKRTVAAPSVFIFPPSDEQLKSGTASVVCLLNNFYPREAKVQWKVDNALQSGNSQESVTEQDSKDSTYSLSSTLTLSKADYEKHKVYACEVTHQGLSSPVTKSFNRGEC

SEQ ID NO: 121 - protein, 215 aa, Artificial Sequence
  anti-C. albicans 2G12 light chain variant
AGVVMTQSPSTLSASVGDTITITCRASQSIETWLAWYQQKPGKAPKLLIYKASTLKTGVPSRFSGSGSGTEFTLTISGLQFDDFATYHCQHYEPFRATFGQGTRVEIKRTVAAPSVFIFPPSDEQLKSGTASVVCLLNNFYPREAKVQWKVDNALQSGNSQESVTEQDSKDSTYSLSSTLTLSKADYEKHKVYACEVTHQGLSSPVTKSFNRGEC

SEQ ID NO: 122 - protein, 215 aa, Artificial Sequence
  anti-C. albicans 2G12 light chain variant
AGVVMTQSPSTLSASVGDTITITCRASQSIETWLAWYQQKPGKAPKLLIYKASTLKTGVPSRFSGSGSGTEFTLTISGLQFDDFATYHCQHYKPFAATFGQGTRVEIKRTVAAPSVFIFPPSDEQLKSGTASVVCLLNNFYPREAKVQWKVDNALQSGNSQESVTEQDSKDSTYSLSSTLTLSKADYEKHKVYACEVTHQGLSSPVTKSFNRGEC

SEQ ID NO: 123 - protein, 215 aa, Artificial Sequence
  anti-C. albicans 2G12 light chain variant
AGVVMTQSPSTLSASVGDTITITCRASQSIETWLAWYQQKPGKAPKLLIYKASTLKTGVPSRFSGSGSGTEFTLTISGLQFDDFATYHCQHYVPFAATFGQGTRVEIKRTVAAPSVFIFPPSDEQLKSGTASVVCLLNNFYPREAKVQWKVDNALQSGNSQESVTEQDSKDSTYSLSSTLTLSKADYEKHKVYACEVTHQGLSSPVTKSFNRGEC

SEQ ID NO: 124 - protein, 215 aa, Artificial Sequence
  anti-C. albicans 2G12 light chain variant
AGVVMTQSPSTLSASVGDTITITCRASQSIETWLAWYQQKPGKAPKLLIYKASTLKTGVPSRFSGSGSGTEFTLTISGLQFDDFATYHCQHYIPFAATFGQGTRVEIKRTVAAPSVFIFPPSDEQLKSGTASVVCLLNNFYPREAKVQWKVDNALQSGNSQESVTEQDSKDSTYSLSSTLTLSKADYEKHKVYACEVTHQGLSSPVTKSFNRGEC

SEQ ID NO: 125 - protein, 215 aa, Artificial Sequence
  anti-C. albicans 2G12 light chain variant
AGVVMTQSPSTLSASVGDTITITCRASQSIETWLAWYQQKPGKAPKLLIYKASTLKTGVPSRFSGSGSGTEFTLTISGLQFDDFATYHCQHYKPFDATFGQGTRVEIKRTVAAPSVFIFPPSDEQLKSGTASVVCLLNNFYPREAKVQWKVDNALQSGNSQESVTEQDSKDSTYSLSSTLTLSKADYEKHKVYACEVTHQGLSSPVTKSFNRGEC

SEQ ID NO: 126 - protein, 215 aa, Artificial Sequence
  anti-C. albicans 2G12 light chain variant
AGVVMTQSPSTLSASVGDTITITCRASQSIETWLAWYQQKPGKAPKLLIYKASTLKTGVPSRFSGSGSGTEFTLTISGLQFDDFATYHCQHYMPFDATFGQGTRVEIKRTVAAPSVFIFPPSDEQLKSGTASVVCLLNNFYPREAKVQWKVDNALQSGNSQESVTEQDSKDSTYSLSSTLTLSKADYEKHKVYACEVTHQGLSSPVTKSFNRGEC

SEQ ID NO: 127 - protein, 215 aa, Artificial Sequence
  anti-C. albicans 2G12 light chain variant
AGVVMTQSPSTLSASVGDTITITCRASQSIETWLAWYQQKPGKAPKLLIYKASTLKTGVPSRFSGSGSGTEFTLTISGLQFDDFATYHCQHYMPFKATFGQGTRVEIKRTVAAPSVFIFPPSDEQLKSGTASVVCLLNNFYPREAKVQWKVDNALQSGNSQESVTEQDSKDSTYSLSSTLTLSKADYEKHKVYACEVTHQGLSSPVTKSFNRGEC

SEQ ID NO: 128 - protein, 215 aa, Artificial Sequence
  anti-C. albicans 2G12 light chain variant
AGVVMTQSPSTLSASVGDTITITCRASQSIETWLAWYQQKPGKAPKLLIYKASTLKTGVPSRFSGSGSGTEFTLTISGLQFDDFATYHCQHYMPFTATFGQGTRVEIKRTVAAPSVFIFPPSDEQLKSGTASVVCLLNNFYPREAKVQWKVDNALQSGNSQESVTEQDSKDSTYSLSSTLTLSKADYEKHKVYACEVTHQGLSSPVTKSFNRGEC

SEQ ID NO: 129 - protein, 215 aa, Artificial Sequence
  anti-C. albicans 2G12 light chain variant
AGVVMTQSPSTLSASVGDTITITCRASQSIETWLAWYQQKPGKAPKLLIYKASTLKTGVPSRFSGSGSGTEFTLTISGLQFDDFATYHCQHYMPFPATFGQGTRVEIKRTVAAPSVFIFPPSDEQLKSGTASVVCLLNNFYPREAKVQWKVDNALQSGNSQESVTEQDSKDSTYSLSSTLTLSKADYEKHKVYACEVTHQGLSSPVTKSFNRGEC

SEQ ID NO: 130 - protein, 215 aa, Artificial Sequence
  anti-C. albicans 2G12 light chain variant
AGVVMTQSPSTLSASVGDTITITCRASQSIETWLAWYQQKPGKAPKLLIYKASTLKTGVPSRFSGSGSGTEFTLTISGLQFDDFATYHCQHYQPFWATFGQGTRVEIKRTVAAPSVFIFPPSDEQLKSGTASVVCLLNNFYPREAKVQWKVDNALQSGNSQESVTEQDSKDSTYSLSSTLTLSKADYEKHKVYACEVTHQGLSSPVTKSFNRGEC

SEQ ID NO: 131 - protein, 215 aa, Artificial Sequence
  anti-C. albicans 2G12 light chain variant
AGVVMTQSPSTLSASVGDTITITCRASQSIETWLAWYQQKPGKAPKLLIYKASTLKTGVPSRFSGSGSGTEFTLTISGLQFDDFATYHCQHYSPFWATFGQGTRVEIKRTVAAPSVFIFPPSDEQLKSGTASVVCLLNNFYPREAKVQWKVDNALQSGNSQESVTEQDSKDSTYSLSSTLTLSKADYEKHKVYACEVTHQGLSSPVTKSFNRGEC

SEQ ID NO: 132 - protein, 215 aa, Artificial Sequence
  anti-C. albicans 2G12 light chain variant
AGVVMTQSPSTLSASVGDTITITCRASQSIETWLAWYQQKPGKAPKLLIYKASTLKTGVPSRFSGSGSGTEFTLTISGLQFDDFATYHCQHYMPYRASFGQGTRVEIKRTVAAPSVFIFPPSDEQLKSGTASVVCLLNNFYPREAKVQWKVDNALQSGNSQESVTEQDSKDSTYSLSSTLTLSKADYEKHKVYACEVTHQGLSSPVTKSFNRGEC

SEQ ID NO: 133 - protein, 215 aa, Artificial Sequence
  anti-C. albicans 2G12 light chain variant
AGVVMTQSPSTLSASVGDTITITCRASQSIETWLAWYQQKPGKAPKLLIYKASTLKTGVPSRFSGSGSGTEFTLTISGLQFDDFATYHCQHYKPYRATFGQGTRVEIKRTVAAPSVFIFPPSDEQLKSGTASVVCLLNNFYPREAKVQWKVDNALQSGNSQESVTEQDSKDSTYSLSSTLTLSKADYEKHKVYACEVTHQGLSSPVTKSFNRGEC

SEQ ID NO: 134 - protein, 215 aa, Artificial Sequence
  anti-C. albicans 2G12 light chain variant
AGVVMTQSPSTLSASVGDTITITCRASQSIETWLAWYQQKPGKAPKLLIYKASTLKTGVPSRFSGSGSGTEFTLTISGLQFDDFATYHCQHYMPYRATFGQGTRVEIKRTVAAPSVFIFPPSDEQLKSGTASVVCLLNNFYPREAKVQWKVDNALQSGNSQESVTEQDSKDSTYSLSSTLTLSKADYEKHKVYACEVTHQGLSSPVTKSFNRGEC

SEQ ID NO: 135 - protein, 215 aa, Artificial Sequence
  anti-C. albicans 2G12 light chain variant
AGVVMTQSPSTLSASVGDTITITCRASQSIETWLAWYQQKPGKAPKLLIYKASTLKTGVPSRFSGSGSGTEFTLTISGLQFDDFATYHCQHYQPYRATFGQGTRVEIKRTVAAPSVFIFPPSDEQLKSGTASVVCLLNNFYPREAKVQWKVDNALQSGNSQESVTEQDSKDSTYSLSSTLTLSKADYEKHKVYACEVTHQGLSSPVTKSFNRGEC

SEQ ID NO: 136 - protein, 215 aa, Artificial Sequence
  anti-C. albicans 2G12  light chain variant
AGVVMTQSPSTLSASVGDTITITCRASQSIETWLAWYQQKPGKAPKLLIYKASTLKTGVPSRFSGSGSGTEFTLTISGLQFDDFATYHCQHYLPYRATFGQGTRVEIKRTVAAPSVFIFPPSDEQLKSGTASVVCLLNNFYPREAKVQWKVDNALQSGNSQESVTEQDSKDSTYSLSSTLTLSKADYEKHKVYACEVTHQGLSSPVTKSFNRGEC

SEQ ID NO: 137 - protein, 215 aa, Artificial Sequence
  anti-C. albicans 2G12 light chain variant
AGVVMTQSPSTLSASVGDTITITCRASQSIETWLAWYQQKPGKAPKLLIYKASTLKTGVPSRFSGSGSGTEFTLTISGLQFDDFATYHCQHYEPYRATFGQGTRVEIKRTVAAPSVFIFPPSDEQLKSGTASVVCLLNNFYPREAKVQWKVDNALQSGNSQESVTEQDSKDSTYSLSSTLTLSKADYEKHKVYACEVTHQGLSSPVTKSFNRGEC

SEQ ID NO: 138 - protein, 215 aa, Artificial Sequence
  anti-C. albicans 2G12 light chain variant
AGVVMTQSPSTLSASVGDTITITCRASQSIETWLAWYQQKPGKAPKLLIYKASTLKTGVPSRFSGSGSGTEFTLTISGLQFDDFATYHCQHYKPYDATFGQGTRVEIKRTVAAPSVFIFPPSDEQLKSGTASVVCLLNNFYPREAKVQWKVDNALQSGNSQESVTEQDSKDSTYSLSSTLTLSKADYEKHKVYACEVTHQGLSSPVTKSFNRGEC

SEQ ID NO: 139 - protein, 215 aa, Artificial Sequence
  anti-C. albicans 2G12 light chain variant
AGVVMTQSPSTLSASVGDTITITCRASQSIETWLAWYQQKPGKAPKLLIYKASTLKTGVPSRFSGSGSGTEFTLTISGLQFDDFATYHCQHYKPYSATFGQGTRVEIKRTVAAPSVFIFPPSDEQLKSGTASVVCLLNNFYPREAKVQWKVDNALQSGNSQESVTEQDSKDSTYSLSSTLTLSKADYEKHKVYACEVTHQGLSSPVTKSFNRGEC

SEQ ID NO: 140 - protein, 215 aa, Artificial Sequence
  anti-C. albicans 2G12 light chain variant
AGVVMTQSPSTLSASVGDTITITCRASQSIETWLAWYQQKPGKAPKLLIYKASTLKTGVPSRFSGSGSGTEFTLTISGLQFDDFATYHCQHYQPYVATFGQGTRVEIKRTVAAPSVFIFPPSDEQLKSGTASVVCLLNNFYPREAKVQWKVDNALQSGNSQESVTEQDSKDSTYSLSSTLTLSKADYEKHKVYACEVTHQGLSSPVTKSFNRGEC

SEQ ID NO: 141 - protein, 215 aa, Artificial Sequence
  anti-C. albicans 2G12 light chain variant
AGVVMTQSPSTLSASVGDTITITCRASQSIETWLAWYQQKPGKAPKLLIYKASTLKTGVPSRFSGSGSGTEFTLTISGLQFDDFATYHCQHYEPYKATFGQGTRVEIKRTVAAPSVFIFPPSDEQLKSGTASVVCLLNNFYPREAKVQWKVDNALQSGNSQESVTEQDSKDSTYSLSSTLTLSKADYEKHKVYACEVTHQGLSSPVTKSFNRGEC

SEQ ID NO: 142 - protein, 215 aa, Artificial Sequence
  anti-C. albicans 2G12 light chain variant
AGVVMTQSPSTLSASVGDTITITCRASQSIETWLAWYQQKPGKAPKLLIYKASTLKTGVPSRFSGSGSGTEFTLTISGLQFDDFATYHCQHYLPYQASFGQGTRVEIKRTVAAPSVFIFPPSDEQLKSGTASVVCLLNNFYPREAKVQWKVDNALQSGNSQESVTEQDSKDSTYSLSSTLTLSKADYEKHKVYACEVTHQGLSSPVTKSFNRGEC

SEQ ID NO: 143 - protein, 216 aa, Artificial Sequence
  anti-C. albicans 2G12 light chain variant
AGVVMTQSPSTLSASVGDTITITCRASQSIETWLAWYQQKPGKAPKLLIYKASTLKTGVPSRFSGSGSGTEFTLTISGLQFDDFATYHCQHYRPHTGATFGQGTRVEIKRTVAAPSVFIFPPSDEQLKSGTASVVCLLNNFYPREAKVQWKVDNALQSGNSQESVTEQDSKDSTYSLSSTLTLSKADYEKHKVYACEVTHQGLSSPVTKSFNRGEC

SEQ ID NO: 144 - protein, 216 aa, Artificial Sequence
  anti-C. albicans 2G12 light chain variant
AGVVMTQSPSTLSASVGDTITITCRASQSIETWLAWYQQKPGKAPKLLIYKASTLKTGVPSRFSGSGSGTEFTLTISGLQFDDFATYHCQHYTAHDGATFGQGTRVEIKRTVAAPSVFIFPPSDEQLKSGTASVVCLLNNFYPREAKVQWKVDNALQSGNSQESVTEQDSKDSTYSLSSTLTLSKADYEKHKVYACEVTHQGLSSPVTKSFNRGEC

SEQ ID NO: 145 - protein, 216 aa, Artificial Sequence
  anti-C. albicans 2G12 light chain variant
AGVVMTQSPSTLSASVGDTITITCRASQSIETWLAWYQQKPGKAPKLLIYKASTLKTGVPSRFSGSGSGTEFTLTISGLQFDDFATYHCQHYTAHRGATFGQGTRVEIKRTVAAPSVFIFPPSDEQLKSGTASVVCLLNNFYPREAKVQWKVDNALQSGNSQESVTEQDSKDSTYSLSSTLTLSKADYEKHKVYACEVTHQGLSSPVTKSFNRGEC

SEQ ID NO: 146 - protein, 216 aa, Artificial Sequence
  anti-C. albicans 2G12 light chain variant
AGVVMTQSPSTLSASVGDTITITCRASQSIETWLAWYQQKPGKAPKLLIYKASTLKTGVPSRFSGSGSGTEFTLTISGLQFDDFATYHCQHYRAHTGATFGQGTRVEIKRTVAAPSVFIFPPSDEQLKSGTASVVCLLNNFYPREAKVQWKVDNALQSGNSQESVTEQDSKDSTYSLSSTLTLSKADYEKHKVYACEVTHQGLSSPVTKSFNRGEC

SEQ ID NO: 147 - protein, 216 aa, Artificial Sequence
  anti-C. albicans 2G12 light chain variant
AGVVMTQSPSTLSASVGDTITITCRASQSIETWLAWYQQKPGKAPKLLIYKASTLKTGVPSRFSGSGSGTEFTLTISGLQFDDFATYHCQHYTAHTGATFGQGTRVEIKRTVAAPSVFIFPPSDEQLKSGTASVVCLLNNFYPREAKVQWKVDNALQSGNSQESVTEQDSKDSTYSLSSTLTLSKADYEKHKVYACEVTHQGLSSPVTKSFNRGEC

SEQ ID NO: 148 - protein, 216 aa, Artificial Sequence
  anti-C. albicans 2G12 light chain variant
AGVVMTQSPSTLSASVGDTITITCRASQSIETWLAWYQQKPGKAPKLLIYKASTLKTGVPSRFSGSGSGTEFTLTISGLQFDDFATYHCQHYTDHHGATFGQGTRVEIKRTVAAPSVFIFPPSDEQLKSGTASVVCLLNNFYPREAKVQWKVDNALQSGNSQESVTEQDSKDSTYSLSSTLTLSKADYEKHKVYACEVTHQGLSSPVTKSFNRGEC

SEQ ID NO: 149 - protein, 216 aa, Artificial Sequence
  anti-C. albicans 2G12 light chain variant
AGVVMTQSPSTLSASVGDTITITCRASQSIETWLAWYQQKPGKAPKLLIYKASTLKTGVPSRFSGSGSGTEFTLTISGLQFDDFATYHCQHYTDHKGATFGQGTRVEIKRTVAAPSVFIFPPSDEQLKSGTASVVCLLNNFYPREAKVQWKVDNALQSGNSQESVTEQDSKDSTYSLSSTLTLSKADYEKHKVYACEVTHQGLSSPVTKSFNRGEC

SEQ ID NO: 150 - protein, 216 aa, Artificial Sequence
  anti-C. albicans 2G12 light chain variant
AGVVMTQSPSTLSASVGDTITITCRASQSIETWLAWYQQKPGKAPKLLIYKASTLKTGVPSRFSGSGSGTEFTLTISGLQFDDFATYHCQHYTDHRGATFGQGTRVEIKRTVAAPSVFIFPPSDEQLKSGTASVVCLLNNFYPREAKVQWKVDNALQSGNSQESVTEQDSKDSTYSLSSTLTLSKADYEKHKVYACEVTHQGLSSPVTKSFNRGEC

SEQ ID NO: 151 - protein, 216 aa, Artificial Sequence
  anti-C. albicans 2G12 light chain variant
AGVVMTQSPSTLSASVGDTITITCRASQSIETWLAWYQQKPGKAPKLLIYKASTLKTGVPSRFSGSGSGTEFTLTISGLQFDDFATYHCQHYTDHYGATFGQGTRVEIKRTVAAPSVFIFPPSDEQLKSGTASVVCLLNNFYPREAKVQWKVDNALQSGNSQESVTEQDSKDSTYSLSSTLTLSKADYEKHKVYACEVTHQGLSSPVTKSFNRGEC

SEQ ID NO: 152 - protein, 14 aa, Artificial Sequence
  2G12 CDRH3
KGSDRLSDNDPFDA

SEQ ID NO: 153 - protein, 14 aa, Artificial Sequence
  2G12 3ALA CDRH3
KGSDRAADADPFDA

SEQ ID NO: 154 - protein, 123 aa, Artificial Sequence
  2G12 VH domain
EVQLVESGGGLVKAGGSLILSCGVSNFRISAHTMNWVRRVPGGGLEWVASISTSSTYRDYADAVKGRFTVSRDDLEDFVYLQMHKMRVEDTAIYYCARKGSDRLSDNDPFDAWGPGTVVTVSP

SEQ ID NO: 155 - protein, 107 aa, Artificial Sequence
  2G12 VL domain
DVVMTQSPSTLSASVGDTITITCRASQSIETWLAWYQQKPGKAPKLLIYKASTLKTGVPSRFSGSGSGTEFTLTISGLQFDDFATYHCQHYAGYSATFGQGTRVEIK

SEQ ID NO: 156 - protein, 123 aa, Artificial Sequence
  2G12 3ALA CDRH3 VH domain
EVQLVESGGGLVKAGGSLILSCGVSNFRISAHTMNWVRRVPGGGLEWVASISTSSTYRDYADAVKGRFTVSRDDLEDFVYLQMHKMRVEDTAIYYCARKGSDRAADADPFDAWGPGTVVTVSP

SEQ ID NO: 157 - protein, 108 aa, Artificial Sequence
  2G12 3ALA CDRL3 VL domain
AGVVMTQSPSTLSASVGDTITITCRASQSIETWLAWYQQKPGKAPKLLIYKASTLKTGVPSRFSGSGSGTEFTLTISGLQFDDFATYHCQHAAGAAATFGQGTRVEIK

SEQ ID NO: 158 - protein, 228 aa, Artificial Sequence
  2G12 3ALA CDRH3 Fab Heavy Chain
EVQLVESGGGLVKAGGSLILSCGVSNFRISAHTMNWVRRVPGGGLEWVASISTSSTYRDYADAVKGRFTVSRDDLEDFVYLQMHKMRVEDTAIYYCARKGSDRAADADPFDAWGPGTVVTVSPASTKGPSVFPLAPSSKSTSGGTAALGCLVKDYFPEPVTVSWNSGALTSGVHTFPAVLQSSGLYSLSSVVTVPSSSLGTQTYICNVNHKPSNTKVDKKVEPKSCLR

SEQ ID NO: 159 - protein, 215 aa, Artificial Sequence
  2G12 3ALA CDRL3 Fab Light Chain
AGVVMTQSPSTLSASVGDTITITCRASQSIETWLAWYQQKPGKAPKLLIYKASTLKTGVPSRFSGSGSGTEFTLTISGLQFDDFATYHCQHAAGAAATFGQGTRVEIKRTVAAPSVFIFPPSDEQLKSGTASVVCLLNNFYPREAKVQWKVDNALQSGNSQESVTEQDSKDSTYSLSSTLTLSKADYEKHKVYACEVTHQGLSSPVTKSFNRGEC

SEQ ID NO: 160 - protein, 453 aa, Artificial Sequence
  2G12 IgG Heavy Chain
EVQLVESGGGLVKAGGSLILSCGVSNFRISAHTMNWVRRVPGGGLEWVASISTSSTYRDYADAVKGRFTVSRDDLEDFVYLQMHKMRVEDTAIYYCARKGSDRLSDNDPFDAWGPGTVVTVSPASTKGPSVFPLAPSSKSTSGGTAALGCLVKDYFPEPVTVSWNSGALTSGVHTFPAVLQSSGLYSLSSVVTVPSSSLGTQTYICNVNHKPSNTKVDKKVEPKSCDKTHTCPPCPAPELLGGPSVFLFPPKPKDTLMISRTPEVTCVVVDVSHEDPEVKFNWYVDGVEVHNAKTKPREEQYNSTYRVVSVLTVLHQDWLNGKEYKCKVSNKALPAPIEKTISKAKGQPREPQVYTLPPSREEMTKNQVSLTCLVKGFYPSDIAVEWESNGQPENNYKTTPPVLDSDGSFFLYSKLTVDKSRWQQGNVFSCSVMHEALHNHYTQKSLSLSPGK

SEQ ID NO: 161 - protein, 226 aa, Artificial Sequence
  2G12 Fab Heavy Chain
EVQLVESGGGLVKAGGSLILSCGVSNFRISAHTMNWVRRVPGGGLEWVASISTSSTYRDYADAVKGRFTVSRDDLEDFVYLQMHKMRVEDTAIYYCARKGSDRLSDNDPFDAWGPGTVVTVSPASTKGPSVFPLAPSSKSTSGGTAALGCLVKDYFPEPVTVSWNSGALTSGVHTFPAVLQSSGLYSLSSVVTVPSSSLGTQTYICNVNHKPSNTKVDKKVEPKSC

SEQ ID NO: 162 - protein, 214 aa, Artificial Sequence
  2G12 Light Chain
DVVMTQSPSTLSASVGDTITITCRASQSIETWLAWYQQKPGKAPKLLIYKASTLKTGVPSRFSGSGSGTEFTLTISGLQFDDFATYHCQHYAGYSATFGQGTRVEIKRTVAAPSVFIFPPSDEQLKSGTASVVCLLNNFYPREAKVQWKVDNALQSGNSQESVTEQDSKDSTYSLSSTLTLSKADYEKHKVYACEVTHQGLSSPVTKSFNRGEC

SEQ ID NO: 163 - protein, 5 aa, Artificial Sequence
  2G12 CDRH1
AHTMN

SEQ ID NO: 164 - protein, 17 aa, Artificial Sequence
  2G12 CDRH2
SISTSSTYRDYADAVKG

SEQ ID NO: 165 - protein, 11 aa, Artificial Sequence
  2G12 CDRL1
RASQSIETWLA

SEQ ID NO: 166 - protein, 7 aa, Artificial Sequence
  2G12 CDRL2
KASTLKT

SEQ ID NO: 167 - protein, 453 aa, Artificial Sequence
  2G12 mutant V5L, H230S
EVQLLESGGGLVKAGGSLILSCGVSNFRISAHTMNWVRRVPGGGLEWVASISTSSTYRDYADAVKGRFTVSRDDLEDFVYLQMHKMRVEDTAIYYCARKGSDRLSDNDPFDAWGPGTVVTVSPASTKGPSVFPLAPSSKSTSGGTAALGCLVKDYFPEPVTVSWNSGALTSGVHTFPAVLQSSGLYSLSSVVTVPSSSLGTQTYICNVNHKPSNTKVDKKVEPKSCDKTSTCPPCPAPELLGGPSVFLFPPKPKDTLMISRTPEVTCVVVDVSHEDPEVKFNWYVDGVEVHNAKTKPREEQYNSTYRVVSVLTVLHQDWLNGKEYKCKVSNKALPAPIEKTISKAKGQPREPQVYTLPPSREEMTKNQVSLTCLVKGFYPSDIAVEWESNGQPENNYKTTPPVLDSDGSFFLYSKLTVDKSRWQQGNVFSCSVMHEALHNHYTQKSLSLSPGK

SEQ ID NO: 168 - protein, 452 aa, Artificial Sequence
  2G12 mutant D1 V5L (H230 deletion)
EVQLLESGGGLVKAGGSLILSCGVSNFRISAHTMNWVRRVPGGGLEWVASISTSSTYRDYADAVKGRFTVSRDDLEDFVYLQMHKMRVEDTAIYYCARKGSDRLSDNDPFDAWGPGTVVTVSPASTKGPSVFPLAPSSKSTSGGTAALGCLVKDYFPEPVTVSWNSGALTSGVHTFPAVLQSSGLYSLSSVVTVPSSSLGTQTYICNVNHKPSNTKVDKKVEPKSCDKTTCPPCPAPELLGGPSVFLFPPKPKDTLMISRTPEVTCVVVDVSHEDPEVKFNWYVDGVEVHNAKTKPREEQYNSTYRVVSVLTVLHQDWLNGKEYKCKVSNKALPAPIEKTISKAKGQPREPQVYTLPPSREEMTKNQVSLTCLVKGFYPSDIAVEWESNGQPENNYKTTPPVLDSDGSFFLYSKLTVDKSRWQQGNVFSCSVMHEALHNHYTQKSLSLSPGK

SEQ ID NO: 169 - protein, 451 aa, Artificial Sequence
  2G12 mutant D2 V5L (T229-H230 deletion)
EVQLLESGGGLVKAGGSLILSCGVSNFRISAHTMNWVRRVPGGGLEWVASISTSSTYRDYADAVKGRFTVSRDDLEDFVYLQMHKMRVEDTAIYYCARKGSDRLSDNDPFDAWGPGTVVTVSPASTKGPSVFPLAPSSKSTSGGTAALGCLVKDYFPEPVTVSWNSGALTSGVHTFPAVLQSSGLYSLSSVVTVPSSSLGTQTYICNVNHKPSNTKVDKKVEPKSCDKTCPPCPAPELLGGPSVFLFPPKPKDTLMISRTPEVTCVVVDVSHEDPEVKFNWYVDGVEVHNAKTKPREEQYNSTYRVVSVLTVLHQDWLNGKEYKCKVSNKALPAPIEKTISKAKGQPREPQVYTLPPSREEMTKNQVSLTCLVKGFYPSDIAVEWESNGQPENNYKTTPPVLDSDGSFFLYSKLTVDKSRWQQGNVFSCSVMHEALHNHYTQKSLSLSPGK

SEQ ID NO: 170 - protein, 450 aa, Artificial Sequence
  2G12 mutant D3 V5L (K228-H230 deletion)
EVQLLESGGGLVKAGGSLILSCGVSNFRISAHTMNWVRRVPGGGLEWVASISTSSTYRDYADAVKGRFTVSRDDLEDFVYLQMHKMRVEDTAIYYCARKGSDRLSDNDPFDAWGPGTVVTVSPASTKGPSVFPLAPSSKSTSGGTAALGCLVKDYFPEPVTVSWNSGALTSGVHTFPAVLQSSGLYSLSSVVTVPSSSLGTQTYICNVNHKPSNTKVDKKVEPKSCDTCPPCPAPELLGGPSVFLFPPKPKDTLMISRTPEVTCVVVDVSHEDPEVKFNWYVDGVEVHNAKTKPREEQYNSTYRVVSVLTVLHQDWLNGKEYKCKVSNKALPAPIEKTISKAKGQPREPQVYTLPPSREEMTKNQVSLTCLVKGFYPSDIAVEWESNGQPENNYKTTPPVLDSDGSFFLYSKLTVDKSRWQQGNVFSCSVMHEALHNHYTQKSLSLSPGK

SEQ ID NO: 171 - protein, 449 aa, Artificial Sequence
  2G12 mutant D4 V5L (D227-H230 deletion)
EVQLLESGGGLVKAGGSLILSCGVSNFRISAHTMNWVRRVPGGGLEWVASISTSSTYRDYADAVKGRFTVSRDDLEDFVYLQMHKMRVEDTAIYYCARKGSDRLSDNDPFDAWGPGTVVTVSPASTKGPSVFPLAPSSKSTSGGTAALGCLVKDYFPEPVTVSWNSGALTSGVHTFPAVLQSSGLYSLSSVVTVPSSSLGTQTYICNVNHKPSNTKVDKKVEPKSCTCPPCPAPELLGGPSVFLFPPKPKDTLMISRTPEVTCVVVDVSHEDPEVKFNWYVDGVEVHNAKTKPREEQYNSTYRVVSVLTVLHQDWLNGKEYKCKVSNKALPAPIEKTISKAKGQPREPQVYTLPPSREEMTKNQVSLTCLVKGFYPSDIAVEWESNGQPENNYKTTPPVLDSDGSFFLYSKLTVDKSRWQQGNVFSCSVMHEALHNHYTQKSLSLSPGK

SEQ ID NO: 172 - protein, 447 aa, Artificial Sequence
  2G12 mutant D6 V5L (D227-C232 deletion)
EVQLLESGGGLVKAGGSLILSCGVSNFRISAHTMNWVRRVPGGGLEWVASISTSSTYRDYADAVKGRFTVSRDDLEDFVYLQMHKMRVEDTAIYYCARKGSDRLSDNDPFDAWGPGTVVTVSPASTKGPSVFPLAPSSKSTSGGTAALGCLVKDYFPEPVTVSWNSGALTSGVHTFPAVLQSSGLYSLSSVVTVPSSSLGTQTYICNVNHKPSNTKVDKKVEPKSCPPCPAPELLGGPSVFLFPPKPKDTLMISRTPEVTCVVVDVSHEDPEVKFNWYVDGVEVHNAKTKPREEQYNSTYRVVSVLTVLHQDWLNGKEYKCKVSNKALPAPIEKTISKAKGQPREPQVYTLPPSREEMTKNQVSLTCLVKGFYPSDIAVEWESNGQPENNYKTTPPVLDSDGSFFLYSKLTVDKSRWQQGNVFSCSVMHEALHNHYTQKSLSLSPGK

SEQ ID NO: 173 - protein, 447 aa, Artificial Sequence
  2G12 mutant D6GG V5L (D227-C232 deletion)
EVQLLESGGGLVKAGGSLILSCGVSNFRISAHTMNWVRRVPGGGLEWVASISTSSTYRDYADAVKGRFTVSRDDLEDFVYLQMHKMRVEDTAIYYCARKGSDRLSDNDPFDAWGPGTVVTVSPASTKGPSVFPLAPSSKSTSGGTAALGCLVKDYFPEPVTVSWNSGALTSGVHTFPAVLQSSGLYSLSSVVTVPSSSLGTQTYICNVNHKPSNTKVDKKVEPKSCGGCPAPELLGGPSVFLFPPKPKDTLMISRTPEVTCVVVDVSHEDPEVKFNWYVDGVEVHNAKTKPREEQYNSTYRVVSVLTVLHQDWLNGKEYKCKVSNKALPAPIEKTISKAKGQPREPQVYTLPPSREEMTKNQVSLTCLVKGFYPSDIAVEWESNGQPENNYKTTPPVLDSDGSFFLYSKLTVDKSRWQQGNVFSCSVMHEALHNHYTQKSLSLSPGK

SEQ ID NO: 174 - protein, 451 aa, Artificial Sequence
  2G12 mutant D2 (T229-H230 deletion)
EVQLVESGGGLVKAGGSLILSCGVSNFRISAHTMNWVRRVPGGGLEWVASISTSSTYRDYADAVKGRFTVSRDDLEDFVYLQMHKMRVEDTAIYYCARKGSDRLSDNDPFDAWGPGTVVTVSPASTKGPSVFPLAPSSKSTSGGTAALGCLVKDYFPEPVTVSWNSGALTSGVHTFPAVLQSSGLYSLSSVVTVPSSSLGTQTYICNVNHKPSNTKVDKKVEPKSCDKTCPPCPAPELLGGPSVFLFPPKPKDTLMISRTPEVTCVVVDVSHEDPEVKFNWYVDGVEVHNAKTKPREEQYNSTYRVVSVLTVLHQDWLNGKEYKCKVSNKALPAPIEKTISKAKGQPREPQVYTLPPSREEMTKNQVSLTCLVKGFYPSDIAVEWESNGQPENNYKTTPPVLDSDGSFFLYSKLTVDKSRWQQGNVFSCSVMHEALHNHYTQKSLSLSPGK

SEQ ID NO: 175 - protein, 123 aa, Artificial Sequence; identical to SEQ ID NO: 154
  Calmune 2G12 VH domain

SEQ ID NO: 176 - protein, 108 aa, Artificial Sequence
  Calmune 2G12 VL domain
AGVVMTQSPSTLSASVGDTITITCRASQSIETWLAWYQQKPGKAPKLLIYKASTLKTGVPSRFSGSGSGTEFTLTISGLQFDDFATYHCQHYAGYSATFGQGTRVEIK

SEQ ID NO: 177 - protein, 107 aa, Artificial Sequence
  2G12 3ALA CDRL3 VL domain
DVVMTQSPSTLSASVGDTITITCRASQSIETWLAWYQQKPGKAPKLLIYKASTLKTGVPSRFSGSGSGTEFTLTISGLQFDDFATYHCQHAAGAAATFGQGTRVEIK

SEQ ID NO: 178 - protein, 214 aa, Artificial Sequence
  2G12 3ALA CDRL3 Fab Light Chain
DVVMTQSPSTLSASVGDTITITCRASQSIETWLAWYQQKPGKAPKLLIYKASTLKTGVPSRFSGSGSGTEFTLTISGLQFDDFATYHCQHAAGAAATFGQGTRVEIKRTVAAPSVFIFPPSDEQLKSGTASVVCLLNNFYPREAKVQWKVDNALQSGNSQESVTEQDSKDSTYSLSSTLTLSKADYEKHKVYACEVTHQGLSSPVTKSFNRGEC

SEQ ID NO: 179 - DNA, 6840 bp, Artificial Sequence
  2G12 Fab hinge in petDuet
ggggaattgtgagcggataacaattcccctctagaaataattttgtttaactttaagaaggagatataccatgaaaaagacagctatcgcgattgcagtggcactggctggtttcgctaccgtggcccaggcggccgttgttatgacccagtctccgtctaccctgtctgcttctgttggtgacaccatcaccatcacctgccgtgcttctcagtctatcgaaacctggctggcttggtaccagcagaaaccgggtaaagctccgaaactgctgatctacaaggcttctaccctgaaaaccggtgttccgtctcgtttctctggttctggttctggtaccgagttcaccctgaccatctctggtctgcagttcgacgacttcgctacctaccactgccagcactacgctggttactctgctaccttcggtcagggtacccgtgttgaaatcaaacgtaccgttgctgctccgtctgttttcatcttcccgccgtctgacgaacagctgaaatctggtaccgcttctgttgtttgcctgctgaacaacttctacccgcgtgaagctaaagttcagtggaaagttgacaacgctctgcagtctggtaactctcaggaatctgttaccgaacaggactctaaagactctacctactctctgtcttctaccctgaccctgtctaaagctgactacgaaaagcacaaagtttacgcttgcgaagttacccaccagggtctgtcttctccggttaccaaatctttcaaccgtggtgaatgctagggccaggccggccgcggccgcataatgcttaagtcgaacagaaagtaatcgtattgtacacggccgcataatcgaaattaatacgactcactataggggaattgtgagcggataacaattccccatcttagtatattagttaagtataagaaggagatatacatatgaaatacctattgcctacggcagccgctggattgttattactcgctgcccaaccagccatggccgaagttcagctggttgaatctggtggtggtctggttaaagctggtggttctctgatcctgtcttgcggtgtttctaacttccgtatctctgctcacaccatgaactgggttcgtcgtgttccgggtggtggtctggaatgggttgcttctatctctacctcttctacctaccgtgactacgctgacgctgttaaaggtcgtttcaccgtttctcgtgacgacctggaagacttcgtttacctgcagatgcataaaatgcgtgttgaagacaccgctatctactactgcgctcgtaaaggttctgaccgtctgtctgacaacgacccgttcgacgcttggggtccgggtaccgttgttaccgtttctccggcgtcgaccaaaggtccgtctgttttcccgctggctccgtcttctaaatctacctctggtggtaccgctgctctgggttgcctggttaaagactacttcccggaaccggttaccgtttcttggaactctggtgctctgacctctggtgttcacaccttcccggctgttctgcagtcttctggtctgtactctctgtcttctgttgttaccgttccgtcttcttctctgggtacccagacctacatctgcaacgttaaccacaaaccgtctaacaccaaagttgacaagaaagttgaaccgaaaagctgcgataaaacccatacctgcccgccgtgcccgcaccatcaccatcaccatggcgcatacccgtacgacgttccggactacgcttcttagctcgagtctggtaaagaaaccgctgctgcgaaatttgaacgccagcacatggactcgtctactagcgcagcttaattaacctaggctgctgccaccgctgagcaataactagcataaccccttggggcctctaaacgggtcttgaggggttttttgctgaaaggaggaactatatccggattggcgaatgggacgcgccctgtagcggcgcattaagcgcggcgggtgtggtggttacgcgcagcgtgaccgctacacttgccagcgccctagcgcccgctcctttcgctttcttcccttcctttctcgccacgttcgccggctttccccgtcaagctctaaatcgggggctccctttagggttccgatttagtgctttacggcacctcgaccccaaaaaacttgattagggtgatggttcacgtagtgggccatcgccctgatagacggtttttcgccctttgacgttggagtccacgttctttaatagtggactcttgttccaaactggaacaacactcaaccctatctcggtctattcttttgatttataagggattttgccgatttcggcctattggttaaaaaatgagctgatttaacaaaaatttaacgcgaattttaacaaaatattaacgtttacaatttctggcggcacgatggcatgagattatcaaaaaggatcttcacctagatccttttaaattaaaaatgaagttttaaatcaatctaaagtatatatgagtaaacttggtctgacagttaccaatgcttaatcagtgaggcacctatctcagcgatctgtctatttcgttcatccatagttgcctgactccccgtcgtgtagataactacgatacgggagggcttaccatctggccccagtgctgcaatgataccgcgagacccacgctcaccggctccagatttatcagcaataaaccagccagccggaagggccgagcgcagaagtggtcctgcaactttatccgcctccatccagtctattaattgttgccgggaagctagagtaagtagttcgccagttaatagtttgcgcaacgttgttgccattgctacaggcatcgtggtgtcacgctcgtcgtttggtatggcttcattcagctccggttcccaacgatcaaggcgagttacatgatcccccatgttgtgcaaaaaagcggttagctccttcggtcctccgatcgttgtcagaagtaagttggccgcagtgttatcactcatggttatggcagcactgcataattctcttactgtcatgccatccgtaagatgcttttctgtgactggtgagtactcaaccaagtcattctgagaatagtgtatgcggcgaccgagttgctcttgcccggcgtcaatacgggataataccgcgccacatagcagaactttaaaagtgctcatcattggaaaacgttcttcggggcgaaaactctcaaggatcttaccgctgttgagatccagttcgatgtaacccactcgtgcacccaactgatcttcagcatcttttactttcaccagcgtttctgggtgagcaaaaacaggaaggcaaaatgccgcaaaaaagggaataagggcgacacggaaatgttgaatactcatactcttcctttttcaatcatgattgaagcatttatcagggttattgtctcatgagcggatacatatttgaatgtatttagaaaaataaacaaataggtcatgaccaaaatcccttaacgtgagttttcgttccactgagcgtcagaccccgtagaaaagatcaaaggatcttcttgagatcctttttttctgcgcgtaatctgctgcttgcaaacaaaaaaaccaccgctaccagcggtggtttgtttgccggatcaagagctaccaactctttttccgaaggtaactggcttcagcagagcgcagataccaaatactgtccttctagtgtagccgtagttaggccaccacttcaagaactctgtagcaccgcctacatacctcgctctgctaatcctgttaccagtggctgctgccagtggcgataagtcgtgtcttaccgggttggactcaagacgatagttaccggataaggcgcagcggtcgggctgaacggggggttcgtgcacacagcccagcttggagcgaacgacctacaccgaactgagatacctacagcgtgagctatgagaaagcgccacgcttcccgaagggagaaaggcggacaggtatccggtaagcggcagggtcggaacaggagagcgcacgagggagcttccagggggaaacgcctggtatctttatagtcctgtcgggtttcgccacctctgacttgagcgtcgatttttgtgatgctcgtcaggggggcggagcctatggaaaaacgccagcaacgcggcctttttacggttcctggccttttgctggccttttgctcacatgttctttcctgcgttatcccctgattctgtggataaccgtattaccgcctttgagtgagctgataccgctcgccgcagccgaacgaccgagcgcagcgagtcagtgagcgaggaagcggaagagcgcctgatgcggtattttctccttacgcatctgtgcggtatttcacaccgcatatatggtgcactctcagtacaatctgctctgatgccgcatagttaagccagtatacactccgctatcgctacgtgactgggtcatggctgcgccccgacacccgccaacacccgctgacgcgccctgacgggcttgtctgctcccggcatccgcttacagacaagctgtgaccgtctccgggagctgcatgtgtcagaggttttcaccgtcatcaccgaaacgcgcgaggcagctgcggtaaagctcatcagcgtggtcgtgaagcgattcacagatgtctgcctgttcatccgcgtccagctcgttgagtttctccagaagcgttaatgtctggcttctgataaagcgggccatgttaagggcggttttttcctgtttggtcactgatgcctccgtgtaagggggatttctgttcatgggggtaatgataccgatgaaacgagagaggatgctcacgatacgggttactgatgatgaacatgcccggttactggaacgttgtgagggtaaacaactggcggtatggatgcggcgggaccagagaaaaatcactcagggtcaatgccagcgcttcgttaatacagatgtaggtgttccacagggtagccagcagcatcctgcgatgcagatccggaacataatggtgcagggcgctgacttccgcgtttccagactttacgaaacacggaaaccgaagaccattcatgttgttgctcaggtcgcagacgttttgcagcagcagtcgcttcacgttcgctcgcgtatcggtgattcattctgctaaccagtaaggcaaccccgccagcctagccgggtcctcaacgacaggagcacgatcatgctagtcatgccccgcgcccaccggaaggagctgactgggttgaaggctctcaagggcatcggtcgagatcccggtgcctaatgagtgagctaacttacattaattgcgttgcgctcactgcccgctttccagtcgggaaacctgtcgtgccagctgcattaatgaatcggccaacgcgcggggagaggcggtttgcgtattgggcgccagggtggtttttcttttcaccagtgagacgggcaacagctgattgcccttcaccgcctggccctgagagagttgcagcaagcggtccacgctggtttgccccagcaggcgaaaatcctgtttgatggtggttaacggcgggatataacatgagctgtcttcggtatcgtcgtatcccactaccgagatgtccgcaccaacgcgcagcccggactcggtaatggcgcgcattgcgcccagcgccatctgatcgttggcaaccagcatcgcagtgggaacgatgccctcattcagcatttgcatggtttgttgaaaaccggacatggcactccagtcgccttcccgttccgctatcggctgaatttgattgcgagtgagatatttatgccagccagccagacgcagacgcgccgagacagaacttaatgggcccgctaacagcgcgatttgctggtgacccaatgcgaccagatgctccacgcccagtcgcgtaccgtcttcatgggagaaaataatactgttgatgggtgtctggtcagagacatcaagaaataacgccggaacattagtgcaggcagcttccacagcaatggcatcctggtcatccagcggatagttaatgatcagcccactgacgcgttgcgcgagaagattgtgcaccgccgctttacaggcttcgacgccgcttcgttctaccatcgacaccaccacgctggcacccagttgatcggcgcgagatttaatcgccgcgacaatttgcgacggcgcgtgcagggccagactggaggtggcaacgccaatcagcaacgactgtttgcccgccagttgttgtgccacgcggttgggaatgtaattcagctccgccatcgccgcttccactttttcccgcgttttcgcagaaacgtggctggcctggttcaccacgcgggaaacggtctgataagagacaccggcatactctgcgacatcgtataacgttactggtttcacattcaccaccctgaattgactctcttccgggcgctatcatgccataccgcgaaaggttttgcgccattcgatggtgtccgggatctcgacgctctcccttatgcgactcctgcattaggaagcagcccagtagtaggttgaggccgttgagcaccgccgccgcaaggaatggtgcatgcaaggagatggcgcccaacagtcccccggccacggggcctgccaccatacccacgccgaaacaagcgctcatgagcccgaagtggcgagcccgatcttccccatcggtgatgtcggcgatataggcgccagcaaccgcacctgtggcgccggtgatgccggccacgatgcgtccggcgtagaggatcgagatcgatctcgatcccgcgaaattaatacgactcactata

SEQ ID NO: 180 - DNA, 6121 bp, Artificial Sequence
  vector with 2G12 domain exchanged scFv
tggcgaatgggacgcgccctgtagcggcgcattaagcgcggcgggtgtggtggttacgcgcagcgtgaccgctacacttgccagcgccctagcgcccgctcctttcgctttcttcccttcctttctcgccacgttcgccggctttccccgtcaagctctaaatcgggggctccctttagggttccgatttagtgctttacggcacctcgaccccaaaaaacttgattagggtgatggttcacgtagtgggccatcgccctgatagacggtttttcgccctttgacgttggagtccacgttctttaatagtggactcttgttccaaactggaacaacactcaaccctatctcggtctattcttttgatttataagggattttgccgatttcggcctattggttaaaaaatgagctgatttaacaaaaatttaacgcgaattttaacaaaatattaacgtttacaatttcaggtggcacttttcggggaaatgtgcgcggaacccctatttgtttatttttctaaatacattcaaatatgtatccgctcatgaattaattcttagaaaaactcatcgagcatcaaatgaaactgcaatttattcatatcaggattatcaataccatatttttgaaaaagccgtttctgtaatgaaggagaaaactcaccgaggcagttccataggatggcaagatcctggtatcggtctgcgattccgactcgtccaacatcaatacaacctattaatttcccctcgtcaaaaataaggttatcaagtgagaaatcaccatgagtgacgactgaatccggtgagaatggcaaaagtttatgcatttctttccagacttgttcaacaggccagccattacgctcgtcatcaaaatcactcgcatcaaccaaaccgttattcattcgtgattgcgcctgagcgagacgaaatacgcgatcgctgttaaaaggacaattacaaacaggaatcgaatgcaaccggcgcaggaacactgccagcgcatcaacaatattttcacctgaatcaggatattcttctaatacctggaatgctgttttcccggggatcgcagtggtgagtaaccatgcatcatcaggagtacggataaaatgcttgatggtcggaagaggcataaattccgtcagccagtttagtctgaccatctcatctgtaacatcattggcaacgctacctttgccatgtttcagaaacaactctggcgcatcgggcttcccatacaatcgatagattgtcgcacctgattgcccgacattatcgcgagcccatttatacccatataaatcagcatccatgttggaatttaatcgcggcctagagcaagacgtttcccgttgaatatggctcataacaccccttgtattactgtttatgtaagcagacagttttattgttcatgaccaaaatcccttaacgtgagttttcgttccactgagcgtcagaccccgtagaaaagatcaaaggatcttcttgagatcctttttttctgcgcgtaatctgctgcttgcaaacaaaaaaaccaccgctaccagcggtggtttgtttgccggatcaagagctaccaactctttttccgaaggtaactggcttcagcagagcgcagataccaaatactgtccttctagtgtagccgtagttaggccaccacttcaagaactctgtagcaccgcctacatacctcgctctgctaatcctgttaccagtggctgctgccagtggcgataagtcgtgtcttaccgggttggactcaagacgatagttaccggataaggcgcagcggtcgggctgaacggggggttcgtgcacacagcccagcttggagcgaacgacctacaccgaactgagatacctacagcgtgagctatgagaaagcgccacgcttcccgaagggagaaaggcggacaggtatccggtaagcggcagggtcggaacaggagagcgcacgagggagcttccagggggaaacgcctggtatctttatagtcctgtcgggtttcgccacctctgacttgagcgtcgatttttgtgatgctcgtcaggggggcggagcctatggaaaaacgccagcaacgcggcctttttacggttcctggccttttgctggccttttgctcacatgttctttcctgcgttatcccctgattctgtggataaccgtattaccgcctttgagtgagctgataccgctcgccgcagccgaacgaccgagcgcagcgagtcagtgagcgaggaagcggaagagcgcctgatgcggtattttctccttacgcatctgtgcggtatttcacaccgcatatatggtgcactctcagtacaatctgctctgatgccgcatagttaagccagtatacactccgctatcgctacgtgactgggtcatggctgcgccccgacacccgccaacacccgctgacgcgccctgacgggcttgtctgctcccggcatccgcttacagacaagctgtgaccgtctccgggagctgcatgtgtcagaggttttcaccgtcatcaccgaaacgcgcgaggcagctgcggtaaagctcatcagcgtggtcgtgaagcgattcacagatgtctgcctgttcatccgcgtccagctcgttgagtttctccagaagcgttaatgtctggcttctgataaagcgggccatgttaagggcggttttttcctgtttggtcactgatgcctccgtgtaagggggatttctgttcatgggggtaatgataccgatgaaacgagagaggatgctcacgatacgggttactgatgatgaacatgcccggttactggaacgttgtgagggtaaacaactggcggtatggatgcggcgggaccagagaaaaatcactcagggtcaatgccagcgcttcgttaatacagatgtaggtgttccacagggtagccagcagcatcctgcgatgcagatccggaacataatggtgcagggcgctgacttccgcgtttccagactttacgaaacacggaaaccgaagaccattcatgttgttgctcaggtcgcagacgttttgcagcagcagtcgcttcacgttcgctcgcgtatcggtgattcattctgctaaccagtaaggcaaccccgccagcctagccgggtcctcaacgacaggagcacgatcatgcgcacccgtggggccgccatgccggcgataatggcctgcttctcgccgaaacgtttggtggcgggaccagtgacgaaggcttgagcgagggcgtgcaagattccgaataccgcaagcgacaggccgatcatcgtcgcgctccagcgaaagcggtcctcgccgaaaatgacccagagcgctgccggcacctgtcctacgagttgcatgataaagaagacagtcataagtgcggcgacgatagtcatgccccgcgcccaccggaaggagctgactgggttgaaggctctcaagggcatcggtcgagatcccggtgcctaatgagtgagctaacttacattaattgcgttgcgctcactgcccgctttccagtcgggaaacctgtcgtgccagctgcattaatgaatcggccaacgcgcggggagaggcggtttgcgtattgggcgccagggtggtttttcttttcaccagtgagacgggcaacagctgattgcccttcaccgcctggccctgagagagttgcagcaagcggtccacgctggtttgccccagcaggcgaaaatcctgtttgatggtggttaacggcgggatataacatgagctgtcttcggtatcgtcgtatcccactaccgagatatccgcaccaacgcgcagcccggactcggtaatggcgcgcattgcgcccagcgccatctgatcgttggcaaccagcatcgcagtgggaacgatgccctcattcagcatttgcatggtttgttgaaaaccggacatggcactccagtcgccttcccgttccgctatcggctgaatttgattgcgagtgagatatttatgccagccagccagacgcagacgcgccgagacagaacttaatgggcccgctaacagcgcgatttgctggtgacccaatgcgaccagatgctccacgcccagtcgcgtaccgtcttcatgggagaaaataatactgttgatgggtgtctggtcagagacatcaagaaataacgccggaacattagtgcaggcagcttccacagcaatggcatcctggtcatccagcggatagttaatgatcagcccactgacgcgttgcgcgagaagattgtgcaccgccgctttacaggcttcgacgccgcttcgttctaccatcgacaccaccacgctggcacccagttgatcggcgcgagatttaatcgccgcgacaatttgcgacggcgcgtgcagggccagactggaggtggcaacgccaatcagcaacgactgtttgcccgccagttgttgtgccacgcggttgggaatgtaattcagctccgccatcgccgcttccactttttcccgcgttttcgcagaaacgtggctggcctggttcaccacgcgggaaacggtctgataagagacaccggcatactctgcgacatcgtataacgttactggtttcacattcaccaccctgaattgactctcttccgggcgctatcatgccataccgcgaaaggttttgcgccattcgatggtgtccgggatctcgacgctctcccttatgcgactcctgcattaggaagcagcccagtagtaggttgaggccgttgagcaccgccgccgcaaggaatggtgcatgcaaggagatggcgcccaacagtcccccggccacggggcctgccaccatacccacgccgaaacaagcgctcatgagcccgaagtggcgagcccgatcttccccatcggtgatgtcggcgatataggcgccagcaaccgcacctgtggcgccggtgatgccggccacgatgcgtccggcgtagaggatcgagatctcgatcccgcgaaattaatacgactcactataggggaattgtgagcggataacaattcccctctagaaataattttgtttaactttaagaaggagatataccatgaaaaagacagctatcgcgattgcagtggcactggctggtttcgctaccgtggcccaggcggccgttgttatgacccagtctccgtctaccctgtctgcttctgttggtgacaccatcaccatcacctgccgtgcttctcagtctatcgaaacctggctggcttggtaccagcagaaaccgggtaaagctccgaaactgctgatctacaaggcttctaccctgaaaaccggtgttccgtctcgtttctctggttctggttctggtaccgagttcaccctgaccatctctggtctgcagttcgacgacttcgctacctaccactgccagcactacgctggttactctgctaccttcggtcagggtacccgtgttgaaatcaaaggtggttcgtctggatcttcctcctctggtggcggtggctcgggcggtggtggcgaagttcagctggttgaatctggtggtggtctggttaaagctggtggttctctgatcctgtcttgcggtgtttctaacttccgtatctctgctcacaccatgaactgggttcgtcgtgttccgggtggtggtctggaatgggttgcttctatctctacctcttctacctaccgtgactacgctgacgctgttaaaggtcgtttcaccgtttctcgtgacgacctggaagacttcgtttacctgcagatgcacaaaatgcgtgttgaagacaccgctatctactactgcgctcgtaaaggttctgaccgtctgtctgacaacgacccgttcgacgcttggggtccgggtaccgttgttaccgtttctccgggccaggccggccagcaccatcaccatcaccatggcgcatacccgtacgacgttccggactacgcttcttaggcggccgcactcgagcaccaccaccaccaccactgagatccggctgctaacaaagcccgaaaggaagctgagttggctgctgccaccgctgagcaataactagcataaccccttggggcctctaaacgggtcttgaggggttttttgctgaaaggaggaactatatccggat

SEQ ID NO: 181 - DNA, 54 bp, Artificial Sequence
  Linker 1
ggtggttcgtctggatcttcctcctctggtggcggtggctcgggcggtggtggc

SEQ ID NO: 182 - DNA, 54 bp, Artificial Sequence
  Linker 2
ggaggatccggcagcagcagcagcggcggcggcggcgggagctccggcggcgga

SEQ ID NO: 183 - DNA, 48 bp, Artificial Sequence
  L216
ggaggatccggcagcagcagcagcggcggcgggagctccggcggcgga

SEQ ID NO: 184 - DNA, 51 bp, Artificial Sequence
  L217
ggaggatccggcagcagcagcagcggcggcggcgggagctccggcggcgga

SEQ ID NO: 185 - DNA, 57 bp, Artificial Sequence
  L219
ggaggatccagcggcagcagcagcagcggcggcggcggcgggagctccggcggcgga

SEQ ID NO: 186 - DNA, 60 bp, Artificial Sequence
  L220
ggaggatccagcggcggcagcagcagcagcggcggcggcggcgggagctccggcggcgga

SEQ ID NO: 187 - DNA, 87 bp, Artificial Sequence
  BamHISacI linker / BamHISacI(+)
gatccggtggcggcagcgaaggtggtggcagcgaaggtggcggtagcgaaggtggcggcagcgaaggcggcggtagcggtgggagct

SEQ ID NO: 188 - DNA, 6916 bp, Artificial Sequence
  vector with 2G12 domain exchanged scFv tandem
tggcgaatgggacgcgccctgtagcggcgcattaagcgcggcgggtgtggtggttacgcgcagcgtgaccgctacacttgccagcgccctagcgcccgctcctttcgctttcttcccttcctttctcgccacgttcgccggctttccccgtcaagctctaaatcgggggctccctttagggttccgatttagtgctttacggcacctcgaccccaaaaaacttgattagggtgatggttcacgtagtgggccatcgccctgatagacggtttttcgccctttgacgttggagtccacgttctttaatagtggactcttgttccaaactggaacaacactcaaccctatctcggtctattcttttgatttataagggattttgccgatttcggcctattggttaaaaaatgagctgatttaacaaaaatttaacgcgaattttaacaaaatattaacgtttacaatttcaggtggcacttttcggggaaatgtgcgcggaacccctatttgtttatttttctaaatacattcaaatatgtatccgctcatgaattaattcttagaaaaactcatcgagcatcaaatgaaactgcaatttattcatatcaggattatcaataccatatttttgaaaaagccgtttctgtaatgaaggagaaaactcaccgaggcagttccataggatggcaagatcctggtatcggtctgcgattccgactcgtccaacatcaatacaacctattaatttcccctcgtcaaaaataaggttatcaagtgagaaatcaccatgagtgacgactgaatccggtgagaatggcaaaagtttatgcatttctttccagacttgttcaacaggccagccattacgctcgtcatcaaaatcactcgcatcaaccaaaccgttattcattcgtgattgcgcctgagcgagacgaaatacgcgatcgctgttaaaaggacaattacaaacaggaatcgaatgcaaccggcgcaggaacactgccagcgcatcaacaatattttcacctgaatcaggatattcttctaatacctggaatgctgttttcccggggatcgcagtggtgagtaaccatgcatcatcaggagtacggataaaatgcttgatggtcggaagaggcataaattccgtcagccagtttagtctgaccatctcatctgtaacatcattggcaacgctacctttgccatgtttcagaaacaactctggcgcatcgggcttcccatacaatcgatagattgtcgcacctgattgcccgacattatcgcgagcccatttatacccatataaatcagcatccatgttggaatttaatcgcggcctagagcaagacgtttcccgttgaatatggctcataacaccccttgtattactgtttatgtaagcagacagttttattgttcatgaccaaaatcccttaacgtgagttttcgttccactgagcgtcagaccccgtagaaaagatcaaaggatcttcttgagatcctttttttctgcgcgtaatctgctgcttgcaaacaaaaaaaccaccgctaccagcggtggtttgtttgccggatcaagagctaccaactctttttccgaaggtaactggcttcagcagagcgcagataccaaatactgtccttctagtgtagccgtagttaggccaccacttcaagaactctgtagcaccgcctacatacctcgctctgctaatcctgttaccagtggctgctgccagtggcgataagtcgtgtcttaccgggttggactcaagacgatagttaccggataaggcgcagcggtcgggctgaacggggggttcgtgcacacagcccagcttggagcgaacgacctacaccgaactgagatacctacagcgtgagctatgagaaagcgccacgcttcccgaagggagaaaggcggacaggtatccggtaagcggcagggtcggaacaggagagcgcacgagggagcttccagggggaaacgcctggtatctttatagtcctgtcgggtttcgccacctctgacttgagcgtcgatttttgtgatgctcgtcaggggggcggagcctatggaaaaacgccagcaacgcggcctttttacggttcctggccttttgctggccttttgctcacatgttctttcctgcgttatcccctgattctgtggataaccgtattaccgcctttgagtgagctgataccgctcgccgcagccgaacgaccgagcgcagcgagtcagtgagcgaggaagcggaagagcgcctgatgcggtattttctccttacgcatctgtgcggtatttcacaccgcatatatggtgcactctcagtacaatctgctctgatgccgcatagttaagccagtatacactccgctatcgctacgtgactgggtcatggctgcgccccgacacccgccaacacccgctgacgcgccctgacgggcttgtctgctcccggcatccgcttacagacaagctgtgaccgtctccgggagctgcatgtgtcagaggttttcaccgtcatcaccgaaacgcgcgaggcagctgcggtaaagctcatcagcgtggtcgtgaagcgattcacagatgtctgcctgttcatccgcgtccagctcgttgagtttctccagaagcgttaatgtctggcttctgataaagcgggccatgttaagggcggttttttcctgtttggtcactgatgcctccgtgtaagggggatttctgttcatgggggtaatgataccgatgaaacgagagaggatgctcacgatacgggttactgatgatgaacatgcccggttactggaacgttgtgagggtaaacaactggcggtatggatgcggcgggaccagagaaaaatcactcagggtcaatgccagcgcttcgttaatacagatgtaggtgttccacagggtagccagcagcatcctgcgatgcagatccggaacataatggtgcagggcgctgacttccgcgtttccagactttacgaaacacggaaaccgaagaccattcatgttgttgctcaggtcgcagacgttttgcagcagcagtcgcttcacgttcgctcgcgtatcggtgattcattctgctaaccagtaaggcaaccccgccagcctagccgggtcctcaacgacaggagcacgatcatgcgcacccgtggggccgccatgccggcgataatggcctgcttctcgccgaaacgtttggtggcgggaccagtgacgaaggcttgagcgagggcgtgcaagattccgaataccgcaagcgacaggccgatcatcgtcgcgctccagcgaaagcggtcctcgccgaaaatgacccagagcgctgccggcacctgtcctacgagttgcatgataaagaagacagtcataagtgcggcgacgatagtcatgccccgcgcccaccggaaggagctgactgggttgaaggctctcaagggcatcggtcgagatcccggtgcctaatgagtgagctaacttacattaattgcgttgcgctcactgcccgctttccagtcgggaaacctgtcgtgccagctgcattaatgaatcggccaacgcgcggggagaggcggtttgcgtattgggcgccagggtggtttttcttttcaccagtgagacgggcaacagctgattgcccttcaccgcctggccctgagagagttgcagcaagcggtccacgctggtttgccccagcaggcgaaaatcctgtttgatggtggttaacggcgggatataacatgagctgtcttcggtatcgtcgtatcccactaccgagatatccgcaccaacgcgcagcccggactcggtaatggcgcgcattgcgcccagcgccatctgatcgttggcaaccagcatcgcagtgggaacgatgccctcattcagcatttgcatggtttgttgaaaaccggacatggcactccagtcgccttcccgttccgctatcggctgaatttgattgcgagtgagatatttatgccagccagccagacgcagacgcgccgagacagaacttaatgggcccgctaacagcgcgatttgctggtgacccaatgcgaccagatgctccacgcccagtcgcgtaccgtcttcatgggagaaaataatactgttgatgggtgtctggtcagagacatcaagaaataacgccggaacattagtgcaggcagcttccacagcaatggcatcctggtcatccagcggatagttaatgatcagcccactgacgcgttgcgcgagaagattgtgcaccgccgctttacaggcttcgacgccgcttcgttctaccatcgacaccaccacgctggcacccagttgatcggcgcgagatttaatcgccgcgacaatttgcgacggcgcgtgcagggccagactggaggtggcaacgccaatcagcaacgactgtttgcccgccagttgttgtgccacgcggttgggaatgtaattcagctccgccatcgccgcttccactttttcccgcgttttcgcagaaacgtggctggcctggttcaccacgcgggaaacggtctgataagagacaccggcatactctgcgacatcgtataacgttactggtttcacattcaccaccctgaattgactctcttccgggcgctatcatgccataccgcgaaaggttttgcgccattcgatggtgtccgggatctcgacgctctcccttatgcgactcctgcattaggaagcagcccagtagtaggttgaggccgttgagcaccgccgccgcaaggaatggtgcatgcaaggagatggcgcccaacagtcccccggccacggggcctgccaccatacccacgccgaaacaagcgctcatgagcccgaagtggcgagcccgatcttccccatcggtgatgtcggcgatataggcgccagcaaccgcacctgtggcgccggtgatgccggccacgatgcgtccggcgtagaggatcgagatctcgatcccgcgaaattaatacgactcactataggggaattgtgagcggataacaattcccctctagaaataattttgtttaactttaagaaggagatataccatgaaaaagacagctatcgcgattgcagtggcactggctggtttcgctaccgtggcccaggcggccgttgttatgacccagtctccgtctaccctgtctgcttctgttggtgacaccatcaccatcacctgccgtgcttctcagtctatcgaaacctggctggcttggtaccagcagaaaccgggtaaagctccgaaactgctgatctacaaggcttctaccctgaaaaccggtgttccgtctcgtttctctggttctggttctggtaccgagttcaccctgaccatctctggtctgcagttcgacgacttcgctacctaccactgccagcactacgctggttactctgctaccttcggtcagggtacccgtgttgaaatcaaaggtggttcgtctggatcttcctcctctggtggcggtggctcgggcggtggtggcgaagttcagctggttgaatctggtggtggtctggttaaagctggtggttctctgatcctgtcttgcggtgtttctaacttccgtatctctgctcacaccatgaactgggttcgtcgtgttccgggtggtggtctggaatgggttgcttctatctctacctcttctacctaccgtgactacgctgacgctgttaaaggtcgtttcaccgtttctcgtgacgacctggaagacttcgtttacctgcagatgcacaaaatgcgtgttgaagacaccgctatctactactgcgctcgtaaaggttctgaccgtctgtctgacaacgacccgttcgacgcttggggtccgggtaccgttgttaccgtttctccgggaggatccggcagcagcagcagcggcggcggcggcgggagctccggcggcggagaagttcagctggttgaatctggtggtggtctggttaaagctggtggttctctgatcctgtcttgcggtgtttctaacttccgtatctctgctcacaccatgaactgggttcgtcgtgttccgggtggtggtctggaatgggttgcttctatctctacctcttctacctaccgtgactacgctgacgctgttaaaggtcgtttcaccgtttctcgtgacgacctggaagacttcgtttacctgcagatgcacaaaatgcgtgttgaagacaccgctatctactactgcgctcgtaaaggttctgaccgtctgtctgacaacgacccgttcgacgcttggggtccgggtaccgttgttaccgtttctccgggtggttcgtctggatcttcctcctctggtggcggtggctcgggcggtggtggcgttgttatgacccagtctccgtctaccctgtctgcttctgttggtgacaccatcaccatcacctgccgtgcttctcagtctatcgaaacctggctggcttggtaccagcagaaaccgggtaaagctccgaaactgctgatctacaaggcttctaccctgaaaaccggtgttccgtctcgtttctctggttctggttctggtaccgagttcaccctgaccatctctggtctgcagttcgacgacttcgctacctaccactgccagcactacgctggttactctgctaccttcggtcagggtacccgtgttgaaatcaaaggccaggccggccagcaccatcaccatcaccatggcgcatacccgtacgacgttccggactacgcttcttaggcggccgcactcgagcaccaccaccaccaccactgagatccggctgctaacaaagcccgaaaggaagctgagttggctgctgccaccgctgagcaataactagcataaccccttggggcctctaaacgggtcttgaggggttttttgctgaaaggaggaactatatccggat

SEQ ID NO: 189 - DNA, 6166 bp, Artificial Sequence
  vector with 2G12 domain exchanged scFv hinge(E)
tggcgaatgggacgcgccctgtagcggcgcattaagcgcggcgggtgtggtggttacgcgcagcgtgaccgctacacttgccagcgccctagcgcccgctcctttcgctttcttcccttcctttctcgccacgttcgccggctttccccgtcaagctctaaatcgggggctccctttagggttccgatttagtgctttacggcacctcgaccccaaaaaacttgattagggtgatggttcacgtagtgggccatcgccctgatagacggtttttcgccctttgacgttggagtccacgttctttaatagtggactcttgttccaaactggaacaacactcaaccctatctcggtctattcttttgatttataagggattttgccgatttcggcctattggttaaaaaatgagctgatttaacaaaaatttaacgcgaattttaacaaaatattaacgtttacaatttcaggtggcacttttcggggaaatgtgcgcggaacccctatttgtttatttttctaaatacattcaaatatgtatccgctcatgaattaattcttagaaaaactcatcgagcatcaaatgaaactgcaatttattcatatcaggattatcaataccatatttttgaaaaagccgtttctgtaatgaaggagaaaactcaccgaggcagttccataggatggcaagatcctggtatcggtctgcgattccgactcgtccaacatcaatacaacctattaatttcccctcgtcaaaaataaggttatcaagtgagaaatcaccatgagtgacgactgaatccggtgagaatggcaaaagtttatgcatttctttccagacttgttcaacaggccagccattacgctcgtcatcaaaatcactcgcatcaaccaaaccgttattcattcgtgattgcgcctgagcgagacgaaatacgcgatcgctgttaaaaggacaattacaaacaggaatcgaatgcaaccggcgcaggaacactgccagcgcatcaacaatattttcacctgaatcaggatattcttctaatacctggaatgctgttttcccggggatcgcagtggtgagtaaccatgcatcatcaggagtacggataaaatgcttgatggtcggaagaggcataaattccgtcagccagtttagtctgaccatctcatctgtaacatcattggcaacgctacctttgccatgtttcagaaacaactctggcgcatcgggcttcccatacaatcgatagattgtcgcacctgattgcccgacattatcgcgagcccatttatacccatataaatcagcatccatgttggaatttaatcgcggcctagagcaagacgtttcccgttgaatatggctcataacaccccttgtattactgtttatgtaagcagacagttttattgttcatgaccaaaatcccttaacgtgagttttcgttccactgagcgtcagaccccgtagaaaagatcaaaggatcttcttgagatcctttttttctgcgcgtaatctgctgcttgcaaacaaaaaaaccaccgctaccagcggtggtttgtttgccggatcaagagctaccaactctttttccgaaggtaactggcttcagcagagcgcagataccaaatactgtccttctagtgtagccgtagttaggccaccacttcaagaactctgtagcaccgcctacatacctcgctctgctaatcctgttaccagtggctgctgccagtggcgataagtcgtgtcttaccgggttggactcaagacgatagttaccggataaggcgcagcggtcgggctgaacggggggttcgtgcacacagcccagcttggagcgaacgacctacaccgaactgagatacctacagcgtgagctatgagaaagcgccacgcttcccgaagggagaaaggcggacaggtatccggtaagcggcagggtcggaacaggagagcgcacgagggagcttccagggggaaacgcctggtatctttatagtcctgtcgggtttcgccacctctgacttgagcgtcgatttttgtgatgctcgtcaggggggcggagcctatggaaaaacgccagcaacgcggcctttttacggttcctggccttttgctggccttttgctcacatgttctttcctgcgttatcccctgattctgtggataaccgtattaccgcctttgagtgagctgataccgctcgccgcagccgaacgaccgagcgcagcgagtcagtgagcgaggaagcggaagagcgcctgatgcggtattttctccttacgcatctgtgcggtatttcacaccgcatatatggtgcactctcagtacaatctgctctgatgccgcatagttaagccagtatacactccgctatcgctacgtgactgggtcatggctgcgccccgacacccgccaacacccgctgacgcgccctgacgggcttgtctgctcccggcatccgcttacagacaagctgtgaccgtctccgggagctgcatgtgtcagaggttttcaccgtcatcaccgaaacgcgcgaggcagctgcggtaaagctcatcagcgtggtcgtgaagcgattcacagatgtctgcctgttcatccgcgtccagctcgttgagtttctccagaagcgttaatgtctggcttctgataaagcgggccatgttaagggcggttttttcctgtttggtcactgatgcctccgtgtaagggggatttctgttcatgggggtaatgataccgatgaaacgagagaggatgctcacgatacgggttactgatgatgaacatgcccggttactggaacgttgtgagggtaaacaactggcggtatggatgcggcgggaccagagaaaaatcactcagggtcaatgccagcgcttcgttaatacagatgtaggtgttccacagggtagccagcagcatcctgcgatgcagatccggaacataatggtgcagggcgctgacttccgcgtttccagactttacgaaacacggaaaccgaagaccattcatgttgttgctcaggtcgcagacgttttgcagcagcagtcgcttcacgttcgctcgcgtatcggtgattcattctgctaaccagtaaggcaaccccgccagcctagccgggtcctcaacgacaggagcacgatcatgcgcacccgtggggccgccatgccggcgataatggcctgcttctcgccgaaacgtttggtggcgggaccagtgacgaaggcttgagcgagggcgtgcaagattccgaataccgcaagcgacaggccgatcatcgtcgcgctccagcgaaagcggtcctcgccgaaaatgacccagagcgctgccggcacctgtcctacgagttgcatgataaagaagacagtcataagtgcggcgacgatagtcatgccccgcgcccaccggaaggagctgactgggttgaaggctctcaagggcatcggtcgagatcccggtgcctaatgagtgagctaacttacattaattgcgttgcgctcactgcccgctttccagtcgggaaacctgtcgtgccagctgcattaatgaatcggccaacgcgcggggagaggcggtttgcgtattgggcgccagggtggtttttcttttcaccagtgagacgggcaacagctgattgcccttcaccgcctggccctgagagagttgcagcaagcggtccacgctggtttgccccagcaggcgaaaatcctgtttgatggtggttaacggcgggatataacatgagctgtcttcggtatcgtcgtatcccactaccgagatatccgcaccaacgcgcagcccggactcggtaatggcgcgcattgcgcccagcgccatctgatcgttggcaaccagcatcgcagtgggaacgatgccctcattcagcatttgcatggtttgttgaaaaccggacatggcactccagtcgccttcccgttccgctatcggctgaatttgattgcgagtgagatatttatgccagccagccagacgcagacgcgccgagacagaacttaatgggcccgctaacagcgcgatttgctggtgacccaatgcgaccagatgctccacgcccagtcgcgtaccgtcttcatgggagaaaataatactgttgatgggtgtctggtcagagacatcaagaaataacgccggaacattagtgcaggcagcttccacagcaatggcatcctggtcatccagcggatagttaatgatcagcccactgacgcgttgcgcgagaagattgtgcaccgccgctttacaggcttcgacgccgcttcgttctaccatcgacaccaccacgctggcacccagttgatcggcgcgagatttaatcgccgcgacaatttgcgacggcgcgtgcagggccagactggaggtggcaacgccaatcagcaacgactgtttgcccgccagttgttgtgccacgcggttgggaatgtaattcagctccgccatcgccgcttccactttttcccgcgttttcgcagaaacgtggctggcctggttcaccacgcgggaaacggtctgataagagacaccggcatactctgcgacatcgtataacgttactggtttcacattcaccaccctgaattgactctcttccgggcgctatcatgccataccgcgaaaggttttgcgccattcgatggtgtccgggatctcgacgctctcccttatgcgactcctgcattaggaagcagcccagtagtaggttgaggccgttgagcaccgccgccgcaaggaatggtgcatgcaaggagatggcgcccaacagtcccccggccacggggcctgccaccatacccacgccgaaacaagcgctcatgagcccgaagtggcgagcccgatcttccccatcggtgatgtcggcgatataggcgccagcaaccgcacctgtggcgccggtgatgccggccacgatgcgtccggcgtagaggatcgagatctcgatcccgcgaaattaatacgactcactataggggaattgtgagcggataacaattcccctctagaaataattttgtttaactttaagaaggagatataccatgaaaaagacagctatcgcgattgcagtggcactggctggtttcgctaccgtggcccaggcggccgttgttatgacccagtctccgtctaccctgtctgcttctgttggtgacaccatcaccatcacctgccgtgcttctcagtctatcgaaacctggctggcttggtaccagcagaaaccgggtaaagctccgaaactgctgatctacaaggcttctaccctgaaaaccggtgttccgtctcgtttctctggttctggttctggtaccgagttcaccctgaccatctctggtctgcagttcgacgacttcgctacctaccactgccagcactacgctggttactctgctaccttcggtcagggtacccgtgttgaaatcaaaggtggttcgtctggatcttcctcctctggtggcggtggctcgggcggtggtggcgaagttcagctggttgaatctggtggtggtctggttaaagctggtggttctctgatcctgtcttgcggtgtttctaacttccgtatctctgctcacaccatgaactgggttcgtcgtgttccgggtggtggtctggaatgggttgcttctatctctacctcttctacctaccgtgactacgctgacgctgttaaaggtcgtttcaccgtttctcgtgacgacctggaagacttcgtttacctgcagatgcacaaaatgcgtgttgaagacaccgctatctactactgcgctcgtaaaggttctgaccgtctgtctgacaacgacccgttcgacgcttggggtccgggtaccgttgttaccgtttctccggaaccgaaaagctgcgataaaacccatacctgcccgccgtgcccgggccaggccggccagcaccatcaccatcaccatggcgcatacccgtacgacgttccggactacgcttcttaggcggccgcactcgagcaccaccaccaccaccactgagatccggctgctaacaaagcccgaaaggaagctgagttggctgctgccaccgctgagcaataactagcataaccccttggggcctctaaacgggtcttgaggggttttttgctgaaaggaggaactatatccggat

SEQ ID NO: 190 - DNA, 6163 bp, Artificial Sequence
  vector with 2G12 domain exchanged scFv hinge deltaE
tggcgaatgggacgcgccctgtagcggcgcattaagcgcggcgggtgtggtggttacgcgcagcgtgaccgctacacttgccagcgccctagcgcccgctcctttcgctttcttcccttcctttctcgccacgttcgccggctttccccgtcaagctctaaatcgggggctccctttagggttccgatttagtgctttacggcacctcgaccccaaaaaacttgattagggtgatggttcacgtagtgggccatcgccctgatagacggtttttcgccctttgacgttggagtccacgttctttaatagtggactcttgttccaaactggaacaacactcaaccctatctcggtctattcttttgatttataagggattttgccgatttcggcctattggttaaaaaatgagctgatttaacaaaaatttaacgcgaattttaacaaaatattaacgtttacaatttcaggtggcacttttcggggaaatgtgcgcggaacccctatttgtttatttttctaaatacattcaaatatgtatccgctcatgaattaattcttagaaaaactcatcgagcatcaaatgaaactgcaatttattcatatcaggattatcaataccatatttttgaaaaagccgtttctgtaatgaaggagaaaactcaccgaggcagttccataggatggcaagatcctggtatcggtctgcgattccgactcgtccaacatcaatacaacctattaatttcccctcgtcaaaaataaggttatcaagtgagaaatcaccatgagtgacgactgaatccggtgagaatggcaaaagtttatgcatttctttccagacttgttcaacaggccagccattacgctcgtcatcaaaatcactcgcatcaaccaaaccgttattcattcgtgattgcgcctgagcgagacgaaatacgcgatcgctgttaaaaggacaattacaaacaggaatcgaatgcaaccggcgcaggaacactgccagcgcatcaacaatattttcacctgaatcaggatattcttctaatacctggaatgctgttttcccggggatcgcagtggtgagtaaccatgcatcatcaggagtacggataaaatgcttgatggtcggaagaggcataaattccgtcagccagtttagtctgaccatctcatctgtaacatcattggcaacgctacctttgccatgtttcagaaacaactctggcgcatcgggcttcccatacaatcgatagattgtcgcacctgattgcccgacattatcgcgagcccatttatacccatataaatcagcatccatgttggaatttaatcgcggcctagagcaagacgtttcccgttgaatatggctcataacaccccttgtattactgtttatgtaagcagacagttttattgttcatgaccaaaatcccttaacgtgagttttcgttccactgagcgtcagaccccgtagaaaagatcaaaggatcttcttgagatcctttttttctgcgcgtaatctgctgcttgcaaacaaaaaaaccaccgctaccagcggtggtttgtttgccggatcaagagctaccaactctttttccgaaggtaactggcttcagcagagcgcagataccaaatactgtccttctagtgtagccgtagttaggccaccacttcaagaactctgtagcaccgcctacatacctcgctctgctaatcctgttaccagtggctgctgccagtggcgataagtcgtgtcttaccgggttggactcaagacgatagttaccggataaggcgcagcggtcgggctgaacggggggttcgtgcacacagcccagcttggagcgaacgacctacaccgaactgagatacctacagcgtgagctatgagaaagcgccacgcttcccgaagggagaaaggcggacaggtatccggtaagcggcagggtcggaacaggagagcgcacgagggagcttccagggggaaacgcctggtatctttatagtcctgtcgggtttcgccacctctgacttgagcgtcgatttttgtgatgctcgtcaggggggcggagcctatggaaaaacgccagcaacgcggcctttttacggttcctggccttttgctggccttttgctcacatgttctttcctgcgttatcccctgattctgtggataaccgtattaccgcctttgagtgagctgataccgctcgccgcagccgaacgaccgagcgcagcgagtcagtgagcgaggaagcggaagagcgcctgatgcggtattttctccttacgcatctgtgcggtatttcacaccgcatatatggtgcactctcagtacaatctgctctgatgccgcatagttaagccagtatacactccgctatcgctacgtgactgggtcatggctgcgccccgacacccgccaacacccgctgacgcgccctgacgggcttgtctgctcccggcatccgcttacagacaagctgtgaccgtctccgggagctgcatgtgtcagaggttttcaccgtcatcaccgaaacgcgcgaggcagctgcggtaaagctcatcagcgtggtcgtgaagcgattcacagatgtctgcctgttcatccgcgtccagctcgttgagtttctccagaagcgttaatgtctggcttctgataaagcgggccatgttaagggcggttttttcctgtttggtcactgatgcctccgtgtaagggggatttctgttcatgggggtaatgataccgatgaaacgagagaggatgctcacgatacgggttactgatgatgaacatgcccggttactggaacgttgtgagggtaaacaactggcggtatggatgcggcgggaccagagaaaaatcactcagggtcaatgccagcgcttcgttaatacagatgtaggtgttccacagggtagccagcagcatcctgcgatgcagatccggaacataatggtgcagggcgctgacttccgcgtttccagactttacgaaacacggaaaccgaagaccattcatgttgttgctcaggtcgcagacgttttgcagcagcagtcgcttcacgttcgctcgcgtatcggtgattcattctgctaaccagtaaggcaaccccgccagcctagccgggtcctcaacgacaggagcacgatcatgcgcacccgtggggccgccatgccggcgataatggcctgcttctcgccgaaacgtttggtggcgggaccagtgacgaaggcttgagcgagggcgtgcaagattccgaataccgcaagcgacaggccgatcatcgtcgcgctccagcgaaagcggtcctcgccgaaaatgacccagagcgctgccggcacctgtcctacgagttgcatgataaagaagacagtcataagtgcggcgacgatagtcatgccccgcgcccaccggaaggagctgactgggttgaaggctctcaagggcatcggtcgagatcccggtgcctaatgagtgagctaacttacattaattgcgttgcgctcactgcccgctttccagtcgggaaacctgtcgtgccagctgcattaatgaatcggccaacgcgcggggagaggcggtttgcgtattgggcgccagggtggtttttcttttcaccagtgagacgggcaacagctgattgcccttcaccgcctggccctgagagagttgcagcaagcggtccacgctggtttgccccagcaggcgaaaatcctgtttgatggtggttaacggcgggatataacatgagctgtcttcggtatcgtcgtatcccactaccgagatatccgcaccaacgcgcagcccggactcggtaatggcgcgcattgcgcccagcgccatctgatcgttggcaaccagcatcgcagtgggaacgatgccctcattcagcatttgcatggtttgttgaaaaccggacatggcactccagtcgccttcccgttccgctatcggctgaatttgattgcgagtgagatatttatgccagccagccagacgcagacgcgccgagacagaacttaatgggcccgctaacagcgcgatttgctggtgacccaatgcgaccagatgctccacgcccagtcgcgtaccgtcttcatgggagaaaataatactgttgatgggtgtctggtcagagacatcaagaaataacgccggaacattagtgcaggcagcttccacagcaatggcatcctggtcatccagcggatagttaatgatcagcccactgacgcgttgcgcgagaagattgtgcaccgccgctttacaggcttcgacgccgcttcgttctaccatcgacaccaccacgctggcacccagttgatcggcgcgagatttaatcgccgcgacaatttgcgacggcgcgtgcagggccagactggaggtggcaacgccaatcagcaacgactgtttgcccgccagttgttgtgccacgcggttgggaatgtaattcagctccgccatcgccgcttccactttttcccgcgttttcgcagaaacgtggctggcctggttcaccacgcgggaaacggtctgataagagacaccggcatactctgcgacatcgtataacgttactggtttcacattcaccaccctgaattgactctcttccgggcgctatcatgccataccgcgaaaggttttgcgccattcgatggtgtccgggatctcgacgctctcccttatgcgactcctgcattaggaagcagcccagtagtaggttgaggccgttgagcaccgccgccgcaaggaatggtgcatgcaaggagatggcgcccaacagtcccccggccacggggcctgccaccatacccacgccgaaacaagcgctcatgagcccgaagtggcgagcccgatcttccccatcggtgatgtcggcgatataggcgccagcaaccgcacctgtggcgccggtgatgccggccacgatgcgtccggcgtagaggatcgagatctcgatcccgcgaaattaatacgactcactataggggaattgtgagcggataacaattcccctctagaaataattttgtttaactttaagaaggagatataccatgaaaaagacagctatcgcgattgcagtggcactggctggtttcgctaccgtggcccaggcggccgttgttatgacccagtctccgtctaccctgtctgcttctgttggtgacaccatcaccatcacctgccgtgcttctcagtctatcgaaacctggctggcttggtaccagcagaaaccgggtaaagctccgaaactgctgatctacaaggcttctaccctgaaaaccggtgttccgtctcgtttctctggttctggttctggtaccgagttcaccctgaccatctctggtctgcagttcgacgacttcgctacctaccactgccagcactacgctggttactctgctaccttcggtcagggtacccgtgttgaaatcaaaggtggttcgtctggatcttcctcctctggtggcggtggctcgggcggtggtggcgaagttcagctggttgaatctggtggtggtctggttaaagctggtggttctctgatcctgtcttgcggtgtttctaacttccgtatctctgctcacaccatgaactgggttcgtcgtgttccgggtggtggtctggaatgggttgcttctatctctacctcttctacctaccgtgactacgctgacgctgttaaaggtcgtttcaccgtttctcgtgacgacctggaagacttcgtttacctgcagatgcacaaaatgcgtgttgaagacaccgctatctactactgcgctcgtaaaggttctgaccgtctgtctgacaacgacccgttcgacgcttggggtccgggtaccgttgttaccgtttctccgccgaaaagctgcgataaaacccatacctgcccgccgtgcccgggccaggccggccagcaccatcaccatcaccatggcgcatacccgtacgacgttccggactacgcttcttaggcggccgcactcgagcaccaccaccaccaccactgagatccggctgctaacaaagcccgaaaggaagctgagttggctgctgccaccgctgagcaataactagcataaccccttggggcctctaaacgggtcttgaggggttttttgctgaaaggaggaactatatccggat

SEQ ID NO: 191 - DNA, 6819 bp, Artificial Sequence
  vector with 2G12 Fab Cys19 construct
ggggaattgtgagcggataacaattcccctctagaaataattttgtttaactttaagaaggagatataccatgaaaaagacagctatcgcgattgcagtggcactggctggtttcgctaccgtggcccaggcggccgttgttatgacccagtctccgtctaccctgtctgcttctgttggtgacaccatcaccatcacctgccgtgcttctcagtctatcgaaacctggctggcttggtaccagcagaaaccgggtaaagctccgaaactgctgatctacaaggcttctaccctgaaaaccggtgttccgtctcgtttctctggttctggttctggtaccgagttcaccctgaccatctctggtctgcagttcgacgacttcgctacctaccactgccagcactacgctggttactctgctaccttcggtcagggtacccgtgttgaaatcaaacgtaccgttgctgctccgtctgttttcatcttcccgccgtctgacgaacagctgaaatctggtaccgcttctgttgtttgcctgctgaacaacttctacccgcgtgaagctaaagttcagtggaaagttgacaacgctctgcagtctggtaactctcaggaatctgttaccgaacaggactctaaagactctacctactctctgtcttctaccctgaccctgtctaaagctgactacgaaaagcacaaagtttacgcttgcgaagttacccaccagggtctgtcttctccggttaccaaatctttcaaccgtggtgaatgctagggccaggccggccgcggccgcataatgcttaagtcgaacagaaagtaatcgtattgtacacggccgcataatcgaaattaatacgactcactataggggaattgtgagcggataacaattccccatcttagtatattagttaagtataagaaggagatatacatatgaaatacctattgcctacggcagccgctggattgttattactcgctgcccaaccagccatggccgaagttcagctggttgaatctggtggtggtctggttaaagctggtggttctctgtgcctgtcttgcggtgtttctaacttccgtatctctgctcacaccatgaactgggttcgtcgtgttccgggtggtggtctggaatgggttgcttctatctctacctcttctacctaccgtgactacgctgacgctgttaaaggtcgtttcaccgtttctcgtgacgacctggaagacttcgtttacctgcagatgcataaaatgcgtgttgaagacaccgctatctactactgcgctcgtaaaggttctgaccgtctgtctgacaacgacccgttcgacgcttggggtccgggtaccgttgttaccgtttctccggcgtcgaccaaaggtccgtctgttttcccgctggctccgtcttctaaatctacctctggtggtaccgctgctctgggttgcctggttaaagactacttcccggaaccggttaccgtttcttggaactctggtgctctgacctctggtgttcacaccttcccggctgttctgcagtcttctggtctgtactctctgtcttctgttgttaccgttccgtcttcttctctgggtacccagacctacatctgcaacgttaaccacaaaccgtctaacaccaaagttgacaagaaagttgaaccgaaatcttgcggcagcagccaccatcaccatcaccatggcgcatacccgtacgacgttccggactacgcttcttagctcgagtctggtaaagaaaccgctgctgcgaaatttgaacgccagcacatggactcgtctactagcgcagcttaattaacctaggctgctgccaccgctgagcaataactagcataaccccttggggcctctaaacgggtcttgaggggttttttgctgaaaggaggaactatatccggattggcgaatgggacgcgccctgtagcggcgcattaagcgcggcgggtgtggtggttacgcgcagcgtgaccgctacacttgccagcgccctagcgcccgctcctttcgctttcttcccttcctttctcgccacgttcgccggctttccccgtcaagctctaaatcgggggctccctttagggttccgatttagtgctttacggcacctcgaccccaaaaaacttgattagggtgatggttcacgtagtgggccatcgccctgatagacggtttttcgccctttgacgttggagtccacgttctttaatagtggactcttgttccaaactggaacaacactcaaccctatctcggtctattcttttgatttataagggattttgccgatttcggcctattggttaaaaaatgagctgatttaacaaaaatttaacgcgaattttaacaaaatattaacgtttacaatttctggcggcacgatggcatgagattatcaaaaaggatcttcacctagatccttttaaattaaaaatgaagttttaaatcaatctaaagtatatatgagtaaacttggtctgacagttaccaatgcttaatcagtgaggcacctatctcagcgatctgtctatttcgttcatccatagttgcctgactccccgtcgtgtagataactacgatacgggagggcttaccatctggccccagtgctgcaatgataccgcgagacccacgctcaccggctccagatttatcagcaataaaccagccagccggaagggccgagcgcagaagtggtcctgcaactttatccgcctccatccagtctattaattgttgccgggaagctagagtaagtagttcgccagttaatagtttgcgcaacgttgttgccattgctacaggcatcgtggtgtcacgctcgtcgtttggtatggcttcattcagctccggttcccaacgatcaaggcgagttacatgatcccccatgttgtgcaaaaaagcggttagctccttcggtcctccgatcgttgtcagaagtaagttggccgcagtgttatcactcatggttatggcagcactgcataattctcttactgtcatgccatccgtaagatgcttttctgtgactggtgagtactcaaccaagtcattctgagaatagtgtatgcggcgaccgagttgctcttgcccggcgtcaatacgggataataccgcgccacatagcagaactttaaaagtgctcatcattggaaaacgttcttcggggcgaaaactctcaaggatcttaccgctgttgagatccagttcgatgtaacccactcgtgcacccaactgatcttcagcatcttttactttcaccagcgtttctgggtgagcaaaaacaggaaggcaaaatgccgcaaaaaagggaataagggcgacacggaaatgttgaatactcatactcttcctttttcaatcatgattgaagcatttatcagggttattgtctcatgagcggatacatatttgaatgtatttagaaaaataaacaaataggtcatgaccaaaatcccttaacgtgagttttcgttccactgagcgtcagaccccgtagaaaagatcaaaggatcttcttgagatcctttttttctgcgcgtaatctgctgcttgcaaacaaaaaaaccaccgctaccagcggtggtttgtttgccggatcaagagctaccaactctttttccgaaggtaactggcttcagcagagcgcagataccaaatactgtccttctagtgtagccgtagttaggccaccacttcaagaactctgtagcaccgcctacatacctcgctctgctaatcctgttaccagtggctgctgccagtggcgataagtcgtgtcttaccgggttggactcaagacgatagttaccggataaggcgcagcggtcgggctgaacggggggttcgtgcacacagcccagcttggagcgaacgacctacaccgaactgagatacctacagcgtgagctatgagaaagcgccacgcttcccgaagggagaaaggcggacaggtatccggtaagcggcagggtcggaacaggagagcgcacgagggagcttccagggggaaacgcctggtatctttatagtcctgtcgggtttcgccacctctgacttgagcgtcgatttttgtgatgctcgtcaggggggcggagcctatggaaaaacgccagcaacgcggcctttttacggttcctggccttttgctggccttttgctcacatgttctttcctgcgttatcccctgattctgtggataaccgtattaccgcctttgagtgagctgataccgctcgccgcagccgaacgaccgagcgcagcgagtcagtgagcgaggaagcggaagagcgcctgatgcggtattttctccttacgcatctgtgcggtatttcacaccgcatatatggtgcactctcagtacaatctgctctgatgccgcatagttaagccagtatacactccgctatcgctacgtgactgggtcatggctgcgccccgacacccgccaacacccgctgacgcgccctgacgggcttgtctgctcccggcatccgcttacagacaagctgtgaccgtctccgggagctgcatgtgtcagaggttttcaccgtcatcaccgaaacgcgcgaggcagctgcggtaaagctcatcagcgtggtcgtgaagcgattcacagatgtctgcctgttcatccgcgtccagctcgttgagtttctccagaagcgttaatgtctggcttctgataaagcgggccatgttaagggcggttttttcctgtttggtcactgatgcctccgtgtaagggggatttctgttcatgggggtaatgataccgatgaaacgagagaggatgctcacgatacgggttactgatgatgaacatgcccggttactggaacgttgtgagggtaaacaactggcggtatggatgcggcgggaccagagaaaaatcactcagggtcaatgccagcgcttcgttaatacagatgtaggtgttccacagggtagccagcagcatcctgcgatgcagatccggaacataatggtgcagggcgctgacttccgcgtttccagactttacgaaacacggaaaccgaagaccattcatgttgttgctcaggtcgcagacgttttgcagcagcagtcgcttcacgttcgctcgcgtatcggtgattcattctgctaaccagtaaggcaaccccgccagcctagccgggtcctcaacgacaggagcacgatcatgctagtcatgccccgcgcccaccggaaggagctgactgggttgaaggctctcaagggcatcggtcgagatcccggtgcctaatgagtgagctaacttacattaattgcgttgcgctcactgcccgctttccagtcgggaaacctgtcgtgccagctgcattaatgaatcggccaacgcgcggggagaggcggtttgcgtattgggcgccagggtggtttttcttttcaccagtgagacgggcaacagctgattgcccttcaccgcctggccctgagagagttgcagcaagcggtccacgctggtttgccccagcaggcgaaaatcctgtttgatggtggttaacggcgggatataacatgagctgtcttcggtatcgtcgtatcccactaccgagatgtccgcaccaacgcgcagcccggactcggtaatggcgcgcattgcgcccagcgccatctgatcgttggcaaccagcatcgcagtgggaacgatgccctcattcagcatttgcatggtttgttgaaaaccggacatggcactccagtcgccttcccgttccgctatcggctgaatttgattgcgagtgagatatttatgccagccagccagacgcagacgcgccgagacagaacttaatgggcccgctaacagcgcgatttgctggtgacccaatgcgaccagatgctccacgcccagtcgcgtaccgtcttcatgggagaaaataatactgttgatgggtgtctggtcagagacatcaagaaataacgccggaacattagtgcaggcagcttccacagcaatggcatcctggtcatccagcggatagttaatgatcagcccactgacgcgttgcgcgagaagattgtgcaccgccgctttacaggcttcgacgccgcttcgttctaccatcgacaccaccacgctggcacccagttgatcggcgcgagatttaatcgccgcgacaatttgcgacggcgcgtgcagggccagactggaggtggcaacgccaatcagcaacgactgtttgcccgccagttgttgtgccacgcggttgggaatgtaattcagctccgccatcgccgcttccactttttcccgcgttttcgcagaaacgtggctggcctggttcaccacgcgggaaacggtctgataagagacaccggcatactctgcgacatcgtataacgttactggtttcacattcaccaccctgaattgactctcttccgggcgctatcatgccataccgcgaaaggttttgcgccattcgatggtgtccgggatctcgacgctctcccttatgcgactcctgcattaggaagcagcccagtagtaggttgaggccgttgagcaccgccgccgcaaggaatggtgcatgcaaggagatggcgcccaacagtcccccggccacggggcctgccaccatacccacgccgaaacaagcgctcatgagcccgaagtggcgagcccgatcttccccatcggtgatgtcggcgatataggcgccagcaaccgcacctgtggcgccggtgatgccggccacgatgcgtccggcgtagaggatcgagatcgatctcgatcccgcgaaattaatacgactcactata

SEQ ID NO: 192 - DNA, 6802 bp, Artificial Sequence
  vector with 2G12 scFab deltaC2Cys19 construct
tggcgaatgggacgcgccctgtagcggcgcattaagcgcggcgggtgtggtggttacgcgcagcgtgaccgctacacttgccagcgccctagcgcccgctcctttcgctttcttcccttcctttctcgccacgttcgccggctttccccgtcaagctctaaatcgggggctccctttagggttccgatttagtgctttacggcacctcgaccccaaaaaacttgattagggtgatggttcacgtagtgggccatcgccctgatagacggtttttcgccctttgacgttggagtccacgttctttaatagtggactcttgttccaaactggaacaacactcaaccctatctcggtctattcttttgatttataagggattttgccgatttcggcctattggttaaaaaatgagctgatttaacaaaaatttaacgcgaattttaacaaaatattaacgtttacaatttcaggtggcacttttcggggaaatgtgcgcggaacccctatttgtttatttttctaaatacattcaaatatgtatccgctcatgaattaattcttagaaaaactcatcgagcatcaaatgaaactgcaatttattcatatcaggattatcaataccatatttttgaaaaagccgtttctgtaatgaaggagaaaactcaccgaggcagttccataggatggcaagatcctggtatcggtctgcgattccgactcgtccaacatcaatacaacctattaatttcccctcgtcaaaaataaggttatcaagtgagaaatcaccatgagtgacgactgaatccggtgagaatggcaaaagtttatgcatttctttccagacttgttcaacaggccagccattacgctcgtcatcaaaatcactcgcatcaaccaaaccgttattcattcgtgattgcgcctgagcgagacgaaatacgcgatcgctgttaaaaggacaattacaaacaggaatcgaatgcaaccggcgcaggaacactgccagcgcatcaacaatattttcacctgaatcaggatattcttctaatacctggaatgctgttttcccggggatcgcagtggtgagtaaccatgcatcatcaggagtacggataaaatgcttgatggtcggaagaggcataaattccgtcagccagtttagtctgaccatctcatctgtaacatcattggcaacgctacctttgccatgtttcagaaacaactctggcgcatcgggcttcccatacaatcgatagattgtcgcacctgattgcccgacattatcgcgagcccatttatacccatataaatcagcatccatgttggaatttaatcgcggcctagagcaagacgtttcccgttgaatatggctcataacaccccttgtattactgtttatgtaagcagacagttttattgttcatgaccaaaatcccttaacgtgagttttcgttccactgagcgtcagaccccgtagaaaagatcaaaggatcttcttgagatcctttttttctgcgcgtaatctgctgcttgcaaacaaaaaaaccaccgctaccagcggtggtttgtttgccggatcaagagctaccaactctttttccgaaggtaactggcttcagcagagcgcagataccaaatactgtccttctagtgtagccgtagttaggccaccacttcaagaactctgtagcaccgcctacatacctcgctctgctaatcctgttaccagtggctgctgccagtggcgataagtcgtgtcttaccgggttggactcaagacgatagttaccggataaggcgcagcggtcgggctgaacggggggttcgtgcacacagcccagcttggagcgaacgacctacaccgaactgagatacctacagcgtgagctatgagaaagcgccacgcttcccgaagggagaaaggcggacaggtatccggtaagcggcagggtcggaacaggagagcgcacgagggagcttccagggggaaacgcctggtatctttatagtcctgtcgggtttcgccacctctgacttgagcgtcgatttttgtgatgctcgtcaggggggcggagcctatggaaaaacgccagcaacgcggcctttttacggttcctggccttttgctggccttttgctcacatgttctttcctgcgttatcccctgattctgtggataaccgtattaccgcctttgagtgagctgataccgctcgccgcagccgaacgaccgagcgcagcgagtcagtgagcgaggaagcggaagagcgcctgatgcggtattttctccttacgcatctgtgcggtatttcacaccgcatatatggtgcactctcagtacaatctgctctgatgccgcatagttaagccagtatacactccgctatcgctacgtgactgggtcatggctgcgccccgacacccgccaacacccgctgacgcgccctgacgggcttgtctgctcccggcatccgcttacagacaagctgtgaccgtctccgggagctgcatgtgtcagaggttttcaccgtcatcaccgaaacgcgcgaggcagctgcggtaaagctcatcagcgtggtcgtgaagcgattcacagatgtctgcctgttcatccgcgtccagctcgttgagtttctccagaagcgttaatgtctggcttctgataaagcgggccatgttaagggcggttttttcctgtttggtcactgatgcctccgtgtaagggggatttctgttcatgggggtaatgataccgatgaaacgagagaggatgctcacgatacgggttactgatgatgaacatgcccggttactggaacgttgtgagggtaaacaactggcggtatggatgcggcgggaccagagaaaaatcactcagggtcaatgccagcgcttcgttaatacagatgtaggtgttccacagggtagccagcagcatcctgcgatgcagatccggaacataatggtgcagggcgctgacttccgcgtttccagactttacgaaacacggaaaccgaagaccattcatgttgttgctcaggtcgcagacgttttgcagcagcagtcgcttcacgttcgctcgcgtatcggtgattcattctgctaaccagtaaggcaaccccgccagcctagccgggtcctcaacgacaggagcacgatcatgcgcacccgtggggccgccatgccggcgataatggcctgcttctcgccgaaacgtttggtggcgggaccagtgacgaaggcttgagcgagggcgtgcaagattccgaataccgcaagcgacaggccgatcatcgtcgcgctccagcgaaagcggtcctcgccgaaaatgacccagagcgctgccggcacctgtcctacgagttgcatgataaagaagacagtcataagtgcggcgacgatagtcatgccccgcgcccaccggaaggagctgactgggttgaaggctctcaagggcatcggtcgagatcccggtgcctaatgagtgagctaacttacattaattgcgttgcgctcactgcccgctttccagtcgggaaacctgtcgtgccagctgcattaatgaatcggccaacgcgcggggagaggcggtttgcgtattgggcgccagggtggtttttcttttcaccagtgagacgggcaacagctgattgcccttcaccgcctggccctgagagagttgcagcaagcggtccacgctggtttgccccagcaggcgaaaatcctgtttgatggtggttaacggcgggatataacatgagctgtcttcggtatcgtcgtatcccactaccgagatatccgcaccaacgcgcagcccggactcggtaatggcgcgcattgcgcccagcgccatctgatcgttggcaaccagcatcgcagtgggaacgatgccctcattcagcatttgcatggtttgttgaaaaccggacatggcactccagtcgccttcccgttccgctatcggctgaatttgattgcgagtgagatatttatgccagccagccagacgcagacgcgccgagacagaacttaatgggcccgctaacagcgcgatttgctggtgacccaatgcgaccagatgctccacgcccagtcgcgtaccgtcttcatgggagaaaataatactgttgatgggtgtctggtcagagacatcaagaaataacgccggaacattagtgcaggcagcttccacagcaatggcatcctggtcatccagcggatagttaatgatcagcccactgacgcgttgcgcgagaagattgtgcaccgccgctttacaggcttcgacgccgcttcgttctaccatcgacaccaccacgctggcacccagttgatcggcgcgagatttaatcgccgcgacaatttgcgacggcgcgtgcagggccagactggaggtggcaacgccaatcagcaacgactgtttgcccgccagttgttgtgccacgcggttgggaatgtaattcagctccgccatcgccgcttccactttttcccgcgttttcgcagaaacgtggctggcctggttcaccacgcgggaaacggtctgataagagacaccggcatactctgcgacatcgtataacgttactggtttcacattcaccaccctgaattgactctcttccgggcgctatcatgccataccgcgaaaggttttgcgccattcgatggtgtccgggatctcgacgctctcccttatgcgactcctgcattaggaagcagcccagtagtaggttgaggccgttgagcaccgccgccgcaaggaatggtgcatgcaaggagatggcgcccaacagtcccccggccacggggcctgccaccatacccacgccgaaacaagcgctcatgagcccgaagtggcgagcccgatcttccccatcggtgatgtcggcgatataggcgccagcaaccgcacctgtggcgccggtgatgccggccacgatgcgtccggcgtagaggatcgagatctcgatcccgcgaaattaatacgactcactataggggaattgtgagcggataacaattcccctctagaaataattttgtttaactttaagaaggagatataccatgaaaaagacagctatcgcgattgcagtggcactggctggtttcgctaccgtggcccaggcggccgttgttatgacccagtctccgtctaccctgtctgcttctgttggtgacaccatcaccatcacctgccgtgcttctcagtctatcgaaacctggctggcttggtaccagcagaaaccgggtaaagctccgaaactgctgatctacaaggcttctaccctgaaaaccggtgttccgtctcgtttctctggttctggttctggtaccgagttcaccctgaccatctctggtctgcagttcgacgacttcgctacctaccactgccagcactacgctggttactctgctaccttcggtcagggtacccgtgttgaaatcaaacgtaccgttgctgctccgtctgttttcatcttcccgccgtctgacgaacagctgaaatctggtaccgcttctgttgtttgcctgctgaacaacttctacccgcgtgaagctaaagttcagtggaaagttgacaacgctctgcagtctggtaactctcaggaatctgttaccgaacaggactctaaagactctacctactctctgtcttctaccctgaccctgtctaaagctgactacgaaaagcacaaagtttacgcttgcgaagttacccaccagggtctgtcttctccggttaccaaatctttcaaccgtggtgaatctggtggtggatccggtggcggcagcgaaggtggtggcagcgaaggtggcggtagcgaaggtggcggcagcgaaggcggcggtagcggtgggagctccggtgaagttcagctggttgaatctggtggtggtctggttaaagctggtggttctctgtgcctgtcttgcggtgtttctaacttccgtatctctgctcacaccatgaactgggttcgtcgtgttccgggtggtggtctggaatgggttgcttctatctctacctcttctacctaccgtgactacgctgacgctgttaaaggtcgtttcaccgtttctcgtgacgacctggaagacttcgtttacctgcagatgcacaaaatgcgtgttgaagacaccgctatctactactgcgctcgtaaaggttctgaccgtctgtctgacaacgacccgttcgacgcttggggtccgggtaccgttgttaccgtttctccggcgtcgaccaaaggtccgtctgttttcccgctggctccgtcttctaaatctacctctggtggtaccgctgctctgggttgcctggttaaagactacttcccggaaccggttaccgtttcttggaactctggtgctctgacctctggtgttcacaccttcccggctgttctgcagtcttctggtctgtactctctgtcttctgttgttaccgttccgtcttcttctctgggtacccagacctacatctgcaacgttaaccacaaaccgtctaacaccaaagttgacaagaaagttgaaccgaaatctggcagcagcggccaggccggccagcaccatcaccatcaccatggcgcatacccgtacgacgttccggactacgcttcttaggcggccgcactcgagcaccaccaccaccaccactgagatccggctgctaacaaagcccgaaaggaagctgagttggctgctgccaccgctgagcaataactagcataaccccttggggcctctaaacgggtcttgaggggttttttgctgaaaggaggaactatatccggat

SEQ ID NO: 193 - DNA, 6121 bp, Artificial Sequence
  vector with 2G12 scFv Cys19 construct
tggcgaatgggacgcgccctgtagcggcgcattaagcgcggcgggtgtggtggttacgcgcagcgtgaccgctacacttgccagcgccctagcgcccgctcctttcgctttcttcccttcctttctcgccacgttcgccggctttccccgtcaagctctaaatcgggggctccctttagggttccgatttagtgctttacggcacctcgaccccaaaaaacttgattagggtgatggttcacgtagtgggccatcgccctgatagacggtttttcgccctttgacgttggagtccacgttctttaatagtggactcttgttccaaactggaacaacactcaaccctatctcggtctattcttttgatttataagggattttgccgatttcggcctattggttaaaaaatgagctgatttaacaaaaatttaacgcgaattttaacaaaatattaacgtttacaatttcaggtggcacttttcggggaaatgtgcgcggaacccctatttgtttatttttctaaatacattcaaatatgtatccgctcatgaattaattcttagaaaaactcatcgagcatcaaatgaaactgcaatttattcatatcaggattatcaataccatatttttgaaaaagccgtttctgtaatgaaggagaaaactcaccgaggcagttccataggatggcaagatcctggtatcggtctgcgattccgactcgtccaacatcaatacaacctattaatttcccctcgtcaaaaataaggttatcaagtgagaaatcaccatgagtgacgactgaatccggtgagaatggcaaaagtttatgcatttctttccagacttgttcaacaggccagccattacgctcgtcatcaaaatcactcgcatcaaccaaaccgttattcattcgtgattgcgcctgagcgagacgaaatacgcgatcgctgttaaaaggacaattacaaacaggaatcgaatgcaaccggcgcaggaacactgccagcgcatcaacaatattttcacctgaatcaggatattcttctaatacctggaatgctgttttcccggggatcgcagtggtgagtaaccatgcatcatcaggagtacggataaaatgcttgatggtcggaagaggcataaattccgtcagccagtttagtctgaccatctcatctgtaacatcattggcaacgctacctttgccatgtttcagaaacaactctggcgcatcgggcttcccatacaatcgatagattgtcgcacctgattgcccgacattatcgcgagcccatttatacccatataaatcagcatccatgttggaatttaatcgcggcctagagcaagacgtttcccgttgaatatggctcataacaccccttgtattactgtttatgtaagcagacagttttattgttcatgaccaaaatcccttaacgtgagttttcgttccactgagcgtcagaccccgtagaaaagatcaaaggatcttcttgagatcctttttttctgcgcgtaatctgctgcttgcaaacaaaaaaaccaccgctaccagcggtggtttgtttgccggatcaagagctaccaactctttttccgaaggtaactggcttcagcagagcgcagataccaaatactgtccttctagtgtagccgtagttaggccaccacttcaagaactctgtagcaccgcctacatacctcgctctgctaatcctgttaccagtggctgctgccagtggcgataagtcgtgtcttaccgggttggactcaagacgatagttaccggataaggcgcagcggtcgggctgaacggggggttcgtgcacacagcccagcttggagcgaacgacctacaccgaactgagatacctacagcgtgagctatgagaaagcgccacgcttcccgaagggagaaaggcggacaggtatccggtaagcggcagggtcggaacaggagagcgcacgagggagcttccagggggaaacgcctggtatctttatagtcctgtcgggtttcgccacctctgacttgagcgtcgatttttgtgatgctcgtcaggggggcggagcctatggaaaaacgccagcaacgcggcctttttacggttcctggccttttgctggccttttgctcacatgttctttcctgcgttatcccctgattctgtggataaccgtattaccgcctttgagtgagctgataccgctcgccgcagccgaacgaccgagcgcagcgagtcagtgagcgaggaagcggaagagcgcctgatgcggtattttctccttacgcatctgtgcggtatttcacaccgcatatatggtgcactctcagtacaatctgctctgatgccgcatagttaagccagtatacactccgctatcgctacgtgactgggtcatggctgcgccccgacacccgccaacacccgctgacgcgccctgacgggcttgtctgctcccggcatccgcttacagacaagctgtgaccgtctccgggagctgcatgtgtcagaggttttcaccgtcatcaccgaaacgcgcgaggcagctgcggtaaagctcatcagcgtggtcgtgaagcgattcacagatgtctgcctgttcatccgcgtccagctcgttgagtttctccagaagcgttaatgtctggcttctgataaagcgggccatgttaagggcggttttttcctgtttggtcactgatgcctccgtgtaagggggatttctgttcatgggggtaatgataccgatgaaacgagagaggatgctcacgatacgggttactgatgatgaacatgcccggttactggaacgttgtgagggtaaacaactggcggtatggatgcggcgggaccagagaaaaatcactcagggtcaatgccagcgcttcgttaatacagatgtaggtgttccacagggtagccagcagcatcctgcgatgcagatccggaacataatggtgcagggcgctgacttccgcgtttccagactttacgaaacacggaaaccgaagaccattcatgttgttgctcaggtcgcagacgttttgcagcagcagtcgcttcacgttcgctcgcgtatcggtgattcattctgctaaccagtaaggcaaccccgccagcctagccgggtcctcaacgacaggagcacgatcatgcgcacccgtggggccgccatgccggcgataatggcctgcttctcgccgaaacgtttggtggcgggaccagtgacgaaggcttgagcgagggcgtgcaagattccgaataccgcaagcgacaggccgatcatcgtcgcgctccagcgaaagcggtcctcgccgaaaatgacccagagcgctgccggcacctgtcctacgagttgcatgataaagaagacagtcataagtgcggcgacgatagtcatgccccgcgcccaccggaaggagctgactgggttgaaggctctcaagggcatcggtcgagatcccggtgcctaatgagtgagctaacttacattaattgcgttgcgctcactgcccgctttccagtcgggaaacctgtcgtgccagctgcattaatgaatcggccaacgcgcggggagaggcggtttgcgtattgggcgccagggtggtttttcttttcaccagtgagacgggcaacagctgattgcccttcaccgcctggccctgagagagttgcagcaagcggtccacgctggtttgccccagcaggcgaaaatcctgtttgatggtggttaacggcgggatataacatgagctgtcttcggtatcgtcgtatcccactaccgagatatccgcaccaacgcgcagcccggactcggtaatggcgcgcattgcgcccagcgccatctgatcgttggcaaccagcatcgcagtgggaacgatgccctcattcagcatttgcatggtttgttgaaaaccggacatggcactccagtcgccttcccgttccgctatcggctgaatttgattgcgagtgagatatttatgccagccagccagacgcagacgcgccgagacagaacttaatgggcccgctaacagcgcgatttgctggtgacccaatgcgaccagatgctccacgcccagtcgcgtaccgtcttcatgggagaaaataatactgttgatgggtgtctggtcagagacatcaagaaataacgccggaacattagtgcaggcagcttccacagcaatggcatcctggtcatccagcggatagttaatgatcagcccactgacgcgttgcgcgagaagattgtgcaccgccgctttacaggcttcgacgccgcttcgttctaccatcgacaccaccacgctggcacccagttgatcggcgcgagatttaatcgccgcgacaatttgcgacggcgcgtgcagggccagactggaggtggcaacgccaatcagcaacgactgtttgcccgccagttgttgtgccacgcggttgggaatgtaattcagctccgccatcgccgcttccactttttcccgcgttttcgcagaaacgtggctggcctggttcaccacgcgggaaacggtctgataagagacaccggcatactctgcgacatcgtataacgttactggtttcacattcaccaccctgaattgactctcttccgggcgctatcatgccataccgcgaaaggttttgcgccattcgatggtgtccgggatctcgacgctctcccttatgcgactcctgcattaggaagcagcccagtagtaggttgaggccgttgagcaccgccgccgcaaggaatggtgcatgcaaggagatggcgcccaacagtcccccggccacggggcctgccaccatacccacgccgaaacaagcgctcatgagcccgaagtggcgagcccgatcttccccatcggtgatgtcggcgatataggcgccagcaaccgcacctgtggcgccggtgatgccggccacgatgcgtccggcgtagaggatcgagatctcgatcccgcgaaattaatacgactcactataggggaattgtgagcggataacaattcccctctagaaataattttgtttaactttaagaaggagatataccatgaaaaagacagctatcgcgattgcagtggcactggctggtttcgctaccgtggcccaggcggccgttgttatgacccagtctccgtctaccctgtctgcttctgttggtgacaccatcaccatcacctgccgtgcttctcagtctatcgaaacctggctggcttggtaccagcagaaaccgggtaaagctccgaaactgctgatctacaaggcttctaccctgaaaaccggtgttccgtctcgtttctctggttctggttctggtaccgagttcaccctgaccatctctggtctgcagttcgacgacttcgctacctaccactgccagcactacgctggttactctgctaccttcggtcagggtacccgtgttgaaatcaaaggtggttcgtctggatcttcctcctctggtggcggtggctcgggcggtggtggcgaagttcagctggttgaatctggtggtggtctggttaaagctggtggttctctgtgcctgtcttgcggtgtttctaacttccgtatctctgctcacaccatgaactgggttcgtcgtgttccgggtggtggtctggaatgggttgcttctatctctacctcttctacctaccgtgactacgctgacgctgttaaaggtcgtttcaccgtttctcgtgacgacctggaagacttcgtttacctgcagatgcacaaaatgcgtgttgaagacaccgctatctactactgcgctcgtaaaggttctgaccgtctgtctgacaacgacccgttcgacgcttggggtccgggtaccgttgttaccgtttctccgggccaggccggccagcaccatcaccatcaccatggcgcatacccgtacgacgttccggactacgcttcttaggcggccgcactcgagcaccaccaccaccaccactgagatccggctgctaacaaagcccgaaaggaagctgagttggctgctgccaccgctgagcaataactagcataaccccttggggcctctaaacgggtcttgaggggttttttgctgaaaggaggaactatatccggat

SEQ ID NO: 194 - DNA, 3513 bp, Artificial Sequence
  pCAL A1
gtggcacttttcggggaaatgtgcgcggaacccctatttgtttatttttctaaatacattcaaatatgtatccgctcatgagacaataaccctgataaatgcttcaataatattgaaaaaggaagagtatgagtattcaacatttccgtgtcgcccttattcccttttttgcggcattttgccttcctgtttttgctcacccagaaacgctggtgaaagtaaaagatgctgaagatcagttgggtgcacgagtgggttacatcgaactggatctcaacagcggtaagatccttgagagttttcgccccgaagaacgttttccaatgatgagcacttttaaagttctgctatgtggcgcggtattatcccgtattgacgccgggcaagagcaactcggtcgccgcatacactattctcagaatgacttggttgagtactcaccagtcacagaaaagcatcttacggatggcatgacagtaagagaattatgcagtgctgccataaccatgagtgataacactgcggccaacttacttctgacaacgatcggaggaccgaaggagctaaccgcttttttgcacaacatgggggatcatgtaactcgccttgatcgttgggaaccggagctgaatgaagccataccaaacgacgagcgtgacaccacgatgcctgtagcaatggcaacaacgttgcgcaaactattaactggcgaactacttactctagcttcccggcaacaattaatagactggatggaggcggataaagttgcaggaccacttctgcgctcggcccttccggctggctggtttattgctgataaatctggagccggtgagcgtgggtctcgcggtatcattgcagcactggggccagatggtaagccctcccgtatcgtagttatctacacgacggggagtcaggcaactatggatgaacgaaatagacagatcgctgagataggtgcctcactgattaagcattggtaactgtcagaccaagtttactcatatatactttagattgatttaaaacttcatttttaatttaaaaggatctaggtgaagatcctttttgataatctcatgaccaaaatcccttaacgtgagttttcgttccactgagcgtcagaccccgtagaaaagatcaaaggatcttcttgagatcctttttttctgcgcgtaatctgctgcttgcaaacaaaaaaaccaccgctaccagcggtggtttgtttgccggatcaagagctaccaactctttttccgaaggtaactggcttcagcagagcgcagataccaaatactgtccttctagtgtagccgtagttaggccaccacttcaagaactctgtagcaccgcctacatacctcgctctgctaatcctgttaccagtggctgctgccagtggcgataagtcgtgtcttaccgggttggactcaagacgatagttaccggataaggcgcagcggtcgggctgaacggggggttcgtgcacacagcccagcttggagcgaacgacctacaccgaactgagatacctacagcgtgagctatgagaaagcgccacgcttcccgaagggagaaaggcggacaggtatccggtaagcggcagggtcggaacaggagagcgcacgagggagcttccagggggaaacgcctggtatctttatagtcctgtcgggtttcgccacctctgacttgagcgtcgatttttgtgatgctcgtcaggggggcggagcctatggaaaaacgccagcaacgcggcctttttacggttcctggccttttgctggccttttgctcacatgttctttcctgcgttatcccctgattctgtggataaccgtattaccgcctttgagtgagctgataccgctcgccgcagccgaacgaccgagcgcagcgagtcagtgagcgaggaagcggaagagcgcccaatacgcaaaccgcctctccccgcgcgttggccgattcattaatgcagctggcacgacaggtttcccgactggaaagcgggcagtgagcgcaacgcaattaatgtgagttagctcactcattaggcaccccaggctttacactttatgcttccggctcgtatgttgtgtggaattgtgagcggataacaattgaattaaggaggatataattatgaaatacctgctgccgaccgcagccgctggtctgctgctgctcgcggcccagccggccatggccgccggtgcctaactctggctggtttcgctaccgtaaccggtttaattaataaggaggatataattatgaaaaagacagctatcgcgattgcagtggcactggctggtttcgctaccgtagcccaggcggccgcacgcgtctggttgaatctggtggggtctggaattctgcgatcgcggccaggccggccgcaccatcaccatcaccatggcgcatacccgtacgacgttccggactacgcttctactagttagaagggtggtggctctgagggtggcggttctgagggtggcggctctgagggaggcggttccggtggtggctctggttccggtgattttgattatgaaaagatggcaaacgctaataagggggctatgaccgaaaatgccgatgaaaacgcgctacagtctgacgctaaaggcaaacttgattctgtcgctactgattacggtgctgctatcgatggtttcattggtgacgtttccggccttgctaatggtaatggtgctactggtgattttgctggctctaattcccaaatggctcaagtcggtgacggtgataattcacctttaatgaataatttccgtcaatatttaccttccctccctcaatcggttgaatgtcgcccttttgtctttggcgctggtaaaccatatgaattttctattgattgtgacaaaataaacttattccgtggtgtctttgcgtttcttttatatgttgccacctttatgtatgtattttctacgtttgctaacatactgcgtaataaggagtcttaagctagctaacgatcgcccttcccaacagttgcgcagcctgaatggcgaatgggacgcgccctgtagcggcgcattaagcgcggcgggtgtggtggttacgcgcagcgtgaccgctacacttgccagcgccctagcgcccgctcctttcgctttcttcccttcctttctcgccacgttcgccggctttccccgtcaagctctaaatcgggggctccctttagggttccgatttagtgctttacggcacctcgaccccaaaaaacttgattagggtgatggttcacgtagtgggccatcgccctgatagacggtttttcgccctttgacgttggagtccacgttctttaatagtggactcttgttccaaactggaacaacactcaaccctatctcggtctattcttttgatttataagggattttgccgatttcggcctattggttaaaaaatgagctgatttaacaaaaatttaacgcgaattttaacaaaatattaacgcttacaatttag

SEQ ID NO: 195 - DNA, 4765 bp, Artificial Sequence
  3-ALA 2G12 pCAL G13
gtggcacttttcggggaaatgtgcgcggaacccctatttgtttatttttctaaatacattcaaatatgtatccgctcatgagacaataaccctgataaatgcttcaataatattgaaaaaggaagagtatgagtattcaacatttccgtgtcgcccttattcccttttttgcggcattttgccttcctgtttttgctcacccagaaacgctggtgaaagtaaaagatgctgaagatcagttgggtgcacgagtgggttacatcgaactggatctcaacagcggtaagatccttgagagttttcgccccgaagaacgttttccaatgatgagcacttttaaagttctgctatgtggcgcggtattatcccgtattgacgccgggcaagagcaactcggtcgccgcatacactattctcagaatgacttggttgagtactcaccagtcacagaaaagcatcttacggatggcatgacagtaagagaattatgcagtgctgccataaccatgagtgataacactgcggccaacttacttctgacaacgatcggaggaccgaaggagctaaccgcttttttgcacaacatgggggatcatgtaactcgccttgatcgttgggaaccggagctgaatgaagccataccaaacgacgagcgtgacaccacgatgcctgtagcaatggcaacaacgttgcgcaaactattaactggcgaactacttactctagcttcccggcaacaattaatagactggatggaggcggataaagttgcaggaccacttctgcgctcggcccttccggctggctggtttattgctgataaatctggagccggtgagcgtgggtctcgcggtatcattgcagcactggggccagatggtaagccctcccgtatcgtagttatctacacgacggggagtcaggcaactatggatgaacgaaatagacagatcgctgagataggtgcctcactgattaagcattggtaactgtcagaccaagtttactcatatatactttagattgatttaaaacttcatttttaatttaaaaggatctaggtgaagatcctttttgataatctcatgaccaaaatcccttaacgtgagttttcgttccactgagcgtcagaccccgtagaaaagatcaaaggatcttcttgagatcctttttttctgcgcgtaatctgctgcttgcaaacaaaaaaaccaccgctaccagcggtggtttgtttgccggatcaagagctaccaactctttttccgaaggtaactggcttcagcagagcgcagataccaaatactgtccttctagtgtagccgtagttaggccaccacttcaagaactctgtagcaccgcctacatacctcgctctgctaatcctgttaccagtggctgctgccagtggcgataagtcgtgtcttaccgggttggactcaagacgatagttaccggataaggcgcagcggtcgggctgaacggggggttcgtgcacacagcccagcttggagcgaacgacctacaccgaactgagatacctacagcgtgagctatgagaaagcgccacgcttcccgaagggagaaaggcggacaggtatccggtaagcggcagggtcggaacaggagagcgcacgagggagcttccagggggaaacgcctggtatctttatagtcctgtcgggtttcgccacctctgacttgagcgtcgatttttgtgatgctcgtcaggggggcggagcctatggaaaaacgccagcaacgcggcctttttacggttcctggccttttgctggccttttgctcacatgttctttcctgcgttatcccctgattctgtggataaccgtattaccgcctttgagtgagctgataccgctcgccgcagccgaacgaccgagcgcagcgagtcagtgagcgaggaagcggaagagcgcccaatacgcaaaccgcctctccccgcgcgttggccgattcattaatgcagctggcacgacaggtttcccgactggaaagcgggcagtgagcgcaacgcaattaatgtgagttagctcactcattaggcaccccaggctttacactttatgcttccggctcgtatgttgtgtggaattgtgagcggataacaattgaattaaggaggatataattatgaaatacctgctgccgaccgcagccgctggtctgctgctgctcgcggcccagccggccatggccgccggtgttgttatgacccagtctccgtctaccctgtctgcttctgttggtgacaccatcaccatcacctgccgtgcttctcagtctatcgaaacctggctggcttggtaccagcagaaaccgggtaaagctccgaaactgctgatctacaaggcttctaccctgaaaaccggtgttccgtctcgtttctctggttctggttctggtaccgagttcaccctgaccatctctggtctgcagttcgacgacttcgctacctaccactgccagcactacgctggttactctgctaccttcggtcagggtacccgtgttgaaatcaaacgtaccgttgctgctccgtctgttttcatcttcccgccgtctgacgaacagctgaaatctggtaccgcttctgttgtttgcctgctgaacaacttctacccgcgtgaagctaaagttcagtggaaagttgacaacgctctgcagtctggtaactctcaggaatctgttaccgaacaggactctaaagactctacctactctctgtcttctaccctgaccctgtctaaagctgactacgaaaagcacaaagtttacgcttgcgaagttacccaccagggtctgtcttctccggttaccaaatctttcaaccgtggtgaatgctaattaattaataaggaggatataattatgaaaaagacagctatcgcgattgcagtggcactggctggtttcgctaccgtagcccaggcggccgcagaagttcagctggttgaatctggtggtggtctggttaaagctggtggttctctgatcctgtcttgcggtgtttctaacttccgtatctctgctcacaccatgaactgggttcgtcgtgttccgggtggtggtctggaatgggttgcttctatctctacctcttctacctaccgtgactacgctgacgctgttaaaggtcgtttcaccgtttctcgtgacgacctggaagacttcgtttacctgcagatgcataaaatgcgtgttgaagacaccgctatctactactgcgctcgtaaaggttctgaccgtgcggcggacgcggacccgttcgacgcttggggtccgggtaccgttgttaccgtttctccggcgtcgaccaaaggtccgtctgttttcccgctggctccgtcttctaaatctacctctggtggtaccgctgctctgggttgcctggttaaagactacttcccggaaccggttaccgtttcttggaactctggtgctctgacctctggtgttcacaccttcccggctgttctgcagtcttctggtctgtactctctgtcttctgttgttaccgttccgtcttcttctctgggtacccagacctacatctgcaacgttaaccacaaaccgtctaacaccaaagttgacaagaaagttgaaccgaaatcttgcctgcgatcgcggccaggccggccgcaccatcaccatcaccatggcgcatacccgtacgacgttccggactacgcttctactagttaggagggtggtggctctgagggtggcggttctgagggtggcggctctgagggaggcggttccggtggtggctctggttccggtgattttgattatgaaaagatggcaaacgctaataagggggctatgaccgaaaatgccgatgaaaacgcgctacagtctgacgctaaaggcaaacttgattctgtcgctactgattacggtgctgctatcgatggtttcattggtgacgtttccggccttgctaatggtaatggtgctactggtgattttgctggctctaattcccaaatggctcaagtcggtgacggtgataattcacctttaatgaataatttccgtcaatatttaccttccctccctcaatcggttgaatgtcgcccttttgtctttggcgctggtaaaccatatgaattttctattgattgtgacaaaataaacttattccgtggtgtctttgcgtttcttttatatgttgccacctttatgtatgtattttctacgtttgctaacatactgcgtaataaggagtcttaagctagctaacgatcgcccttcccaacagttgcgcagcctgaatggcgaatgggacgcgccctgtagcggcgcattaagcgcggcgggtgtggtggttacgcgcagcgtgaccgctacacttgccagcgccctagcgcccgctcctttcgctttcttcccttcctttctcgccacgttcgccggctttccccgtcaagctctaaatcgggggctccctttagggttccgatttagtgctttacggcacctcgaccccaaaaaacttgattagggtgatggttcacgtagtgggccatcgccctgatagacggtttttcgccctttgacgttggagtccacgttctttaatagtggactcttgttccaaactggaacaacactcaaccctatctcggtctattcttttgatttataagggattttgccgatttcggcctattggttaaaaaatgagctgatttaacaaaaatttaacgcgaattttaacaaaatattaacgcttacaatttag

SEQ ID NO: 196 - DNA, 4765 bp, Artificial Sequence
  3-ALA LC 2G12 pCAL G13
gtggcacttttcggggaaatgtgcgcggaacccctatttgtttatttttctaaatacattcaaatatgtatccgctcatgagacaataaccctgataaatgcttcaataatattgaaaaaggaagagtatgagtattcaacatttccgtgtcgcccttattcccttttttgcggcattttgccttcctgtttttgctcacccagaaacgctggtgaaagtaaaagatgctgaagatcagttgggtgcacgagtgggttacatcgaactggatctcaacagcggtaagatccttgagagttttcgccccgaagaacgttttccaatgatgagcacttttaaagttctgctatgtggcgcggtattatcccgtattgacgccgggcaagagcaactcggtcgccgcatacactattctcagaatgacttggttgagtactcaccagtcacagaaaagcatcttacggatggcatgacagtaagagaattatgcagtgctgccataaccatgagtgataacactgcggccaacttacttctgacaacgatcggaggaccgaaggagctaaccgcttttttgcacaacatgggggatcatgtaactcgccttgatcgttgggaaccggagctgaatgaagccataccaaacgacgagcgtgacaccacgatgcctgtagcaatggcaacaacgttgcgcaaactattaactggcgaactacttactctagcttcccggcaacaattaatagactggatggaggcggataaagttgcaggaccacttctgcgctcggcccttccggctggctggtttattgctgataaatctggagccggtgagcgtgggtctcgcggtatcattgcagcactggggccagatggtaagccctcccgtatcgtagttatctacacgacggggagtcaggcaactatggatgaacgaaatagacagatcgctgagataggtgcctcactgattaagcattggtaactgtcagaccaagtttactcatatatactttagattgatttaaaacttcatttttaatttaaaaggatctaggtgaagatcctttttgataatctcatgaccaaaatcccttaacgtgagttttcgttccactgagcgtcagaccccgtagaaaagatcaaaggatcttcttgagatcctttttttctgcgcgtaatctgctgcttgcaaacaaaaaaaccaccgctaccagcggtggtttgtttgccggatcaagagctaccaactctttttccgaaggtaactggcttcagcagagcgcagataccaaatactgtccttctagtgtagccgtagttaggccaccacttcaagaactctgtagcaccgcctacatacctcgctctgctaatcctgttaccagtggctgctgccagtggcgataagtcgtgtcttaccgggttggactcaagacgatagttaccggataaggcgcagcggtcgggctgaacggggggttcgtgcacacagcccagcttggagcgaacgacctacaccgaactgagatacctacagcgtgagctatgagaaagcgccacgcttcccgaagggagaaaggcggacaggtatccggtaagcggcagggtcggaacaggagagcgcacgagggagcttccagggggaaacgcctggtatctttatagtcctgtcgggtttcgccacctctgacttgagcgtcgatttttgtgatgctcgtcaggggggcggagcctatggaaaaacgccagcaacgcggcctttttacggttcctggccttttgctggccttttgctcacatgttctttcctgcgttatcccctgattctgtggataaccgtattaccgcctttgagtgagctgataccgctcgccgcagccgaacgaccgagcgcagcgagtcagtgagcgaggaagcggaagagcgcccaatacgcaaaccgcctctccccgcgcgttggccgattcattaatgcagctggcacgacaggtttcccgactggaaagcgggcagtgagcgcaacgcaattaatgtgagttagctcactcattaggcaccccaggctttacactttatgcttccggctcgtatgttgtgtggaattgtgagcggataacaattgaattaaggaggatataattatgaaatacctgctgccgaccgcagccgctggtctgctgctgctcgcggcccagccggccatggccgccggtgttgttatgacccagtctccgtctaccctgtctgcttctgttggtgacaccatcaccatcacctgccgtgcttctcagtctatcgaaacctggctggcttggtaccagcagaaaccgggtaaagctccgaaactgctgatctacaaggcttctaccctgaaaaccggtgttccgtctcgtttctctggttctggttctggtaccgagttcaccctgaccatctctggtctgcagttcgacgacttcgctacctaccactgccagcacgcggctggtgcggcggctaccttcggtcagggtacccgtgttgaaatcaaacgtaccgttgctgctccgtctgttttcatcttcccgccgtctgacgaacagctgaaatctggtaccgcttctgttgtttgcctgctgaacaacttctacccgcgtgaagctaaagttcagtggaaagttgacaacgctctgcagtctggtaactctcaggaatctgttaccgaacaggactctaaagactctacctactctctgtcttctaccctgaccctgtctaaagctgactacgaaaagcacaaagtttacgcttgcgaagttacccaccagggtctgtcttctccggttaccaaatctttcaaccgtggtgaatgctaattaattaataaggaggatataattatgaaaaagacagctatcgcgattgcagtggcactggctggtttcgctaccgtagcccaggcggccgcagaagttcagctggttgaatctggtggtggtctggttaaagctggtggttctctgatcctgtcttgcggtgtttctaacttccgtatctctgctcacaccatgaactgggttcgtcgtgttccgggtggtggtctggaatgggttgcttctatctctacctcttctacctaccgtgactacgctgacgctgttaaaggtcgtttcaccgtttctcgtgacgacctggaagacttcgtttacctgcagatgcataaaatgcgtgttgaagacaccgctatctactactgcgctcgtaaaggttctgaccgtctgtctgacaacgacccgttcgacgcttggggtccgggtaccgttgttaccgtttctccggcgtcgaccaaaggtccgtctgttttcccgctggctccgtcttctaaatctacctctggtggtaccgctgctctgggttgcctggttaaagactacttcccggaaccggttaccgtttcttggaactctggtgctctgacctctggtgttcacaccttcccggctgttctgcagtcttctggtctgtactctctgtcttctgttgttaccgttccgtcttcttctctgggtacccagacctacatctgcaacgttaaccacaaaccgtctaacaccaaagttgacaagaaagttgaaccgaaatcttgcctgcgatcgcggccaggccggccgcaccatcaccatcaccatggcgcatacccgtacgacgttccggactacgcttctactagttaggagggtggtggctctgagggtggcggttctgagggtggcggctctgagggaggcggttccggtggtggctctggttccggtgattttgattatgaaaagatggcaaacgctaataagggggctatgaccgaaaatgccgatgaaaacgcgctacagtctgacgctaaaggcaaacttgattctgtcgctactgattacggtgctgctatcgatggtttcattggtgacgtttccggccttgctaatggtaatggtgctactggtgattttgctggctctaattcccaaatggctcaagtcggtgacggtgataattcacctttaatgaataatttccgtcaatatttaccttccctccctcaatcggttgaatgtcgcccttttgtctttggcgctggtaaaccatatgaattttctattgattgtgacaaaataaacttattccgtggtgtctttgcgtttcttttatatgttgccacctttatgtatgtattttctacgtttgctaacatactgcgtaataaggagtcttaagctagctaacgatcgcccttcccaacagttgcgcagcctgaatggcgaatgggacgcgccctgtagcggcgcattaagcgcggcgggtgtggtggttacgcgcagcgtgaccgctacacttgccagcgccctagcgcccgctcctttcgctttcttcccttcctttctcgccacgttcgccggctttccccgtcaagctctaaatcgggggctccctttagggttccgatttagtgctttacggcacctcgaccccaaaaaacttgattagggtgatggttcacgtagtgggccatcgccctgatagacggtttttcgccctttgacgttggagtccacgttctttaatagtggactcttgttccaaactggaacaacactcaaccctatctcggtctattcttttgatttataagggattttgccgatttcggcctattggttaaaaaatgagctgatttaacaaaaatttaacgcgaattttaacaaaatattaacgcttacaatttag

SEQ ID NO: 197 - DNA, 4765 bp, Artificial Sequence
  2G12 pCAL A1
gtggcacttttcggggaaatgtgcgcggaacccctatttgtttatttttctaaatacattcaaatatgtatccgctcatgagacaataaccctgataaatgcttcaataatattgaaaaaggaagagtatgagtattcaacatttccgtgtcgcccttattcccttttttgcggcattttgccttcctgtttttgctcacccagaaacgctggtgaaagtaaaagatgctgaagatcagttgggtgcacgagtgggttacatcgaactggatctcaacagcggtaagatccttgagagttttcgccccgaagaacgttttccaatgatgagcacttttaaagttctgctatgtggcgcggtattatcccgtattgacgccgggcaagagcaactcggtcgccgcatacactattctcagaatgacttggttgagtactcaccagtcacagaaaagcatcttacggatggcatgacagtaagagaattatgcagtgctgccataaccatgagtgataacactgcggccaacttacttctgacaacgatcggaggaccgaaggagctaaccgcttttttgcacaacatgggggatcatgtaactcgccttgatcgttgggaaccggagctgaatgaagccataccaaacgacgagcgtgacaccacgatgcctgtagcaatggcaacaacgttgcgcaaactattaactggcgaactacttactctagcttcccggcaacaattaatagactggatggaggcggataaagttgcaggaccacttctgcgctcggcccttccggctggctggtttattgctgataaatctggagccggtgagcgtgggtctcgcggtatcattgcagcactggggccagatggtaagccctcccgtatcgtagttatctacacgacggggagtcaggcaactatggatgaacgaaatagacagatcgctgagataggtgcctcactgattaagcattggtaactgtcagaccaagtttactcatatatactttagattgatttaaaacttcatttttaatttaaaaggatctaggtgaagatcctttttgataatctcatgaccaaaatcccttaacgtgagttttcgttccactgagcgtcagaccccgtagaaaagatcaaaggatcttcttgagatcctttttttctgcgcgtaatctgctgcttgcaaacaaaaaaaccaccgctaccagcggtggtttgtttgccggatcaagagctaccaactctttttccgaaggtaactggcttcagcagagcgcagataccaaatactgtccttctagtgtagccgtagttaggccaccacttcaagaactctgtagcaccgcctacatacctcgctctgctaatcctgttaccagtggctgctgccagtggcgataagtcgtgtcttaccgggttggactcaagacgatagttaccggataaggcgcagcggtcgggctgaacggggggttcgtgcacacagcccagcttggagcgaacgacctacaccgaactgagatacctacagcgtgagctatgagaaagcgccacgcttcccgaagggagaaaggcggacaggtatccggtaagcggcagggtcggaacaggagagcgcacgagggagcttccagggggaaacgcctggtatctttatagtcctgtcgggtttcgccacctctgacttgagcgtcgatttttgtgatgctcgtcaggggggcggagcctatggaaaaacgccagcaacgcggcctttttacggttcctggccttttgctggccttttgctcacatgttctttcctgcgttatcccctgattctgtggataaccgtattaccgcctttgagtgagctgataccgctcgccgcagccgaacgaccgagcgcagcgagtcagtgagcgaggaagcggaagagcgcccaatacgcaaaccgcctctccccgcgcgttggccgattcattaatgcagctggcacgacaggtttcccgactggaaagcgggcagtgagcgcaacgcaattaatgtgagttagctcactcattaggcaccccaggctttacactttatgcttccggctcgtatgttgtgtggaattgtgagcggataacaattgaattaaggaggatataattatgaaatacctgctgccgaccgcagccgctggtctgctgctgctcgcggcccagccggccatggccgccggtgttgttatgacccagtctccgtctaccctgtctgcttctgttggtgacaccatcaccatcacctgccgtgcttctcagtctatcgaaacctggctggcttggtaccagcagaaaccgggtaaagctccgaaactgctgatctacaaggcttctaccctgaaaaccggtgttccgtctcgtttctctggttctggttctggtaccgagttcaccctgaccatctctggtctgcagttcgacgacttcgctacctaccactgccagcactacgctggttactctgctaccttcggtcagggtacccgtgttgaaatcaaacgtaccgttgctgctccgtctgttttcatcttcccgccgtctgacgaacagctgaaatctggtaccgcttctgttgtttgcctgctgaacaacttctacccgcgtgaagctaaagttcagtggaaagttgacaacgctctgcagtctggtaactctcaggaatctgttaccgaacaggactctaaagactctacctactctctgtcttctaccctgaccctgtctaaagctgactacgaaaagcacaaagtttacgcttgcgaagttacccaccagggtctgtcttctccggttaccaaatctttcaaccgtggtgaatgctaattaattaataaggaggatataattatgaaaaagacagctatcgcgattgcagtggcactggctggtttcgctaccgtagcccaggcggccgcagaagttcagctggttgaatctggtggtggtctggttaaagctggtggttctctgatcctgtcttgcggtgtttctaacttccgtatctctgctcacaccatgaactgggttcgtcgtgttccgggtggtggtctggaatgggttgcttctatctctacctcttctacctaccgtgactacgctgacgctgttaaaggtcgtttcaccgtttctcgtgacgacctggaagacttcgtttacctgcagatgcataaaatgcgtgttgaagacaccgctatctactactgcgctcgtaaaggttctgaccgtctgtctgacaacgacccgttcgacgcttggggtccgggtaccgttgttaccgtttctccggcgtcgaccaaaggtccgtctgttttcccgctggctccgtcttctaaatctacctctggtggtaccgctgctctgggttgcctggttaaagactacttcccggaaccggttaccgtttcttggaactctggtgctctgacctctggtgttcacaccttcccggctgttctgcagtcttctggtctgtactctctgtcttctgttgttaccgttccgtcttcttctctgggtacccagacctacatctgcaacgttaaccacaaaccgtctaacaccaaagttgacaagaaagttgaaccgaaatcttgcctgcgatcgcggccaggccggccgcaccatcaccatcaccatggcgcatacccgtacgacgttccggactacgcttctactagttagaagggtggtggctctgagggtggcggttctgagggtggcggctctgagggaggcggttccggtggtggctctggttccggtgattttgattatgaaaagatggcaaacgctaataagggggctatgaccgaaaatgccgatgaaaacgcgctacagtctgacgctaaaggcaaacttgattctgtcgctactgattacggtgctgctatcgatggtttcattggtgacgtttccggccttgctaatggtaatggtgctactggtgattttgctggctctaattcccaaatggctcaagtcggtgacggtgataattcacctttaatgaataatttccgtcaatatttaccttccctccctcaatcggttgaatgtcgcccttttgtctttggcgctggtaaaccatatgaattttctattgattgtgacaaaataaacttattccgtggtgtctttgcgtttcttttatatgttgccacctttatgtatgtattttctacgtttgctaacatactgcgtaataaggagtcttaagctagctaacgatcgcccttcccaacagttgcgcagcctgaatggcgaatgggacgcgccctgtagcggcgcattaagcgcggcgggtgtggtggttacgcgcagcgtgaccgctacacttgccagcgccctagcgcccgctcctttcgctttcttcccttcctttctcgccacgttcgccggctttccccgtcaagctctaaatcgggggctccctttagggttccgatttagtgctttacggcacctcgaccccaaaaaacttgattagggtgatggttcacgtagtgggccatcgccctgatagacggtttttcgccctttgacgttggagtccacgttctttaatagtggactcttgttccaaactggaacaacactcaaccctatctcggtctattcttttgatttataagggattttgccgatttcggcctattggttaaaaaatgagctgatttaacaaaaatttaacgcgaattttaacaaaatattaacgcttacaatttag

SEQ ID NO: 198 - protein, 424 aa, Artificial Sequence
  M13 gene III protein (cp3; g3p; minor coat protein; g.i. 59799327)
MKKLLFAIPLVVPFYSHSAETVESCLAKPHTENSFTNVWKDDKTLDRYANYEGCLWNATGVVVCTGDETQCYGTWVPIGLAIPENEGGGSEGGGSEGGGSEGGGTKPPEYGDTPIPGYTYINPLDGTYPPGTEQNPANPNPSLEESQPLNTFMFQNNRFRNRQGALTVYTGTVTQGTDPVKTYYQYTPVSSKAMYDAYWNGKFRDCAFHSGFNEDPFVCEYQGQSSDLPQPPVNAGGGSGGGSGGGSEGGGSEGGGSEGGGSEGGGSGGGSGSGDFDYEKMANANKGAMTENADENALQSDAKGKLDSVATDYGAAIDGFIGDVSGLANGNGATGDFAGSNSQMAQVGDGDNSPLMNNFRQYLPSLPQSVECRPFVFSAGKPYEFSIDCDKINLFRGVFAFLLYVATFMYVFSTFANILRNKES

SEQ ID NO: 199 - DNA, 42 bp, Artificial Sequence
  2G12LCF1
gccgctgtgccatcgctcagtaaccaattgaattaaggagga

SEQ ID NO: 200 - DNA, 35 bp, Artificial Sequence
  2G12LCR1
ggcggcgctcttctagcgaagtcgtcgaactgcag

SEQ ID NO: 201 - DNA, 54 bp, Artificial Sequence
  2G12ALACF2
gctacctaccactgccagcacgccgcgggtgcggccgcgaccttcggtcagggt

SEQ ID NO: 202 - DNA, 54 bp, Artificial Sequence
  2G12ALACR2
ggtaccctgaccgaaggtcgcggccgcacccgcggcgtgctggcagtggtaggt

SEQ ID NO: 203 - DNA, 35 bp, Artificial Sequence
  2G12LCF3
ggcggcgctcttctacccgtgttgaaatcaaacgt

SEQ ID NO: 204 - DNA, 42 bp, Artificial Sequence
  2G12IgGLC-F
ggtccctggctcgagtgaggttgttatgacccagtctccgtc

SEQ ID NO: 205 - DNA, 44 bp, Artificial Sequence
  2G12IgGLC-R
cctggtaccgaattcttagcattcaccacggttgaaagatttgg

SEQ ID NO: 206 - DNA, 63 bp, Artificial Sequence
  2G12HindIIILC-F1
gtaagcaagcttatggacatgagagtgcctgcacagctgctgggactgctgctgctgtggctg

SEQ ID NO: 207 - DNA, 62 bp, Artificial Sequence
  2G12HindIIILC-F2
ggactgctgctgctgtggctgccaggcgccaagtgcgacgttgttatgacccagtctccgtc

SEQ ID NO: 208 - DNA, 46 bp, Artificial Sequence
  2G12EcoRILC-R
cgctacgaattctcagcattcaccacggttgaaagatttggtaacc

SEQ ID NO: 209 - protein, 453 aa, Artificial Sequence
  pCALM 2G12 IgG Heavy Chain
EVQLVESGGGLVKAGGSLILSCGVSNFRISAHTMNWVRRVPGGGLEWVASISTSSTYRDYADAVKGRFTVSRDDLEDFVYLQMHKMRVEDTAIYYCARKGSDRLSDNDPFDAWGPGTVVTVSPASTKGPSVFPLAPSSKSTSGGTAALGCLVKDYFPEPVTVSWNSGALTSGVHTFPAVLQSSGLYSLSSVVTVPSSSLGTQTYICNVNHKPSNTKVDKKVEPKSCDKTHTCPPCPAPELLGGPSVFLFPPKPKDTLMISRTPEVTCVVVDVSHEDPEVKFNWYVDGVEVHNAKTKPREEQYNSTYRVVSVLTVLHQDWLNGKEYKCKVSNKALPAPIEKTISKAKGQPREPQVYTLPPSRDELTKNQVSLTCLVKGFYPSDIAVEWESNGQPENNYKTTPPVLDSDGSFFLYSKLTVDKSRWQQGNVFSCSVMHEALHNHYTQKSLSLSPGK

SEQ ID NO: 210 - protein, 452 aa, Artificial Sequence
  pDR12 2G12 IgG Heavy Chain
EVQLVESGGGLVKAGGSLILSCGVSNFRISAHTMNWVRRVPGGGLEWVASISTSSTYRDYADAVKGRFTVSRDDLEDFVYLQMHKMRVEDTAIYYCARKGSDRLSDNDPFDAWGPGTVVTVSPASTKGPSVFPLAPSSKSTSGGTAALGCLVKDYFPEPVTVSWNSGALTSGVHTFPAVLQSSGLYSLSSVVTVPSSSLGTQTYICNVNHKPSNTKVDKKVEPKSCDKTHTCPPCAPELLGGPSVFLFPPKPKDTLMISRTPEVTCVVVDVSHEDPEVKFNWYVDGVEVHNAKTKPREEQYNSTYRVVSVLTVLHQDWLNGKEYKCKVSNKALPAPIEKTISKAKGQPREPQVYTLPPSRDELTKNQVSLTCLVKGFYPSDIAVEWESNGQPENNYKTTPPVLDSDGSFFLYSKLTVDKSRWQQGNVFSCSVMHEALHNHYTQKSLSLSPGK

SEQ ID NO: 211 - DNA, 6455 bp, Artificial Sequence
  2G12 pCALM 8His
atgcattagttattaatagtaatcaattacggggtcattagttcatagcccatatatggagttccgcgttacataacttacggtaaatggcccgcctggctgaccgcccaacgacccccgcccattgacgtcaataatgacgtatgttcccatagtaacgccaatagggactttccattgacgtcaatgggtggagtatttacggtaaactgcccacttggcagtacatcaagtgtatcatatgccaagtacgccccctattgacgtcaatgacggtaaatggcccgcctggcattatgcccagtacatgaccttatgggactttcctacttggcagtacatctacgtattagtcatcgctattaccatggtgatgcggttttggcagtacatcaatgggcgtggatagcggtttgactcacggggatttccaagtctccaccccattgacgtcaatgggagtttgttttggcaccaaaatcaacgggactttccaaaatgtcgtaacaactccgccccattgacgcaaatgggcggtaggcgtgtacggtgggaggtctatataagcagagctggtttagtgaaccgtcagatccgctagcgattacgccaagctcgaaattaaccctcactaaagggaacaaaagctggagctccaccgcggtggcggccgcccaccatggactggacctggcggatcctgttcctggtggccgcggccaccggagcccacagcgaagttcagctggttgaatctggtggtggtctggttaaagctggtggttctctgatcctgtcttgcggtgtttctaacttccgtatctctgctcacaccatgaactgggttcgtcgtgttccgggtggtggtctggaatgggttgcttctatctctacctcttctacctaccgtgactacgctgacgctgttaaaggtcgtttcaccgtttctcgtgacgacctggaagacttcgtttacctgcagatgcataaaatgcgtgttgaagacaccgctatctactactgcgctcgtaaaggttctgaccgtctgtctgacaacgacccgttcgacgcttggggtccgggtaccgttgttaccgtttctccggctagcaccaagggccccagcgtgttccccctggcccccagcagcaagagcaccagcggcggcaccgccgccctgggctgcctggtgaaggactacttccccgagcccgtgaccgtgagctggaacagcggcgccctgaccagcggcgtgcacaccttccccgccgtgctgcagagcagcggcctgtacagcctgagcagcgtggtgaccgtgcccagcagcagcctgggcacccagacctacatctgcaacgtgaaccacaagcccagcaacaccaaggtggacaagaaggtggagcccaagagctgcgacaaaactcacacatgcccaccgtgcccagcacctgaactcctggggggaccgtcagtcttcctcttccccccaaaacccaaggacaccctcatgatctcccggacccctgaggtcacatgcgtggtggtggacgtgagccacgaagaccctgaggtcaagttcaactggtacgtggacggcgtggaggtgcataatgccaagacaaagccgcgggaggagcagtacaacagcacgtaccgggtggtcagcgtcctcaccgtcctgcaccaggactggctgaatggcaaggagtacaagtgcaaggtctccaacaaagccctcccagcccccatcgagaaaaccatctccaaagccaaagggcagccccgagaaccacaggtgtacaccctgcccccatcccgggatgagctgaccaagaaccaggtcagcctgacctgcctggtcaaaggcttctatcccagcgacatcgccgtggagtgggagagcaatgggcagccggagaacaactacaagaccacgcctcccgtgctggactccgacggctccttcttcctctacagcaagctcaccgtggacaagagcaggtggcagcaggggaacgtcttctcatgctccgtgatgcatgaggctctgcacaaccactacacgcagaagagcctctccctgtctccgggtaaaggcgggtctcatcaccaccatcaccatcaccatggcactagtcgggccaagcgggcacccgtgaagcagaccctgaacttcgacctgctgaagctggccggcgacgtggagagcaaccccggccccatgaggctccctgctcagctcctggggctgctaatgctctgggtccctggctcgagtgaggttgttatgacccagtctccgtctaccctgtctgcttctgttggtgacaccatcaccatcacctgccgtgcttctcagtctatcgaaacctggctggcttggtaccagcagaaaccgggtaaagctccgaaactgctgatctacaaggcttctaccctgaaaaccggtgttccgtctcgtttctctggttctggttctggtaccgagttcaccctgaccatctctggtctgcagttcgacgacttcgctacctaccactgccagcactacgctggttactctgctaccttcggtcagggtacccgtgttgaaatcaaacgtaccgttgctgctccgtctgttttcatcttcccgccgtctgacgaacagctgaaatctggtaccgcttctgttgtttgcctgctgaacaacttctacccgcgtgaagctaaagttcagtggaaagttgacaacgctctgcagtctggtaactctcaggaatctgttaccgaacaggactctaaagactctacctactctctgtcttctaccctgaccctgtctaaagctgactacgaaaagcacaaagtttacgcttgcgaagttacccaccagggtctgtcttctccggttaccaaatctttcaaccgtggtgaatgctaagaattcggtaccaggtaagtgtacccaattcgccctatagtgagtcgtattacaattcactcgatcgcccttcccaacagttgcgcagcctgaatggcgaatggagatccaatttttaagtgtataatgtgttaaactactgattctaattgtttgtgtattttagattcacagtcccaaggctcatttcaggcccctcagtcctcacagtctgttcatgatcataatcagccataccacatttgtagaggttttacttgctttaaaaaacctcccacacctccccctgaacctgaaacataaaatgaatgcaattgttgttgttaacttgtttattgcagcttataatggttacaaataaagcaatagcatcacaaatttcacaaataaagcatttttttcactgcattctagttgtggtttgtccaaactcatcaatgtatcttaacgcgtaaattgtaagcgttaatattttgttaaaattcgcgttaaatttttgttaaatcagctcattttttaaccaataggccgaaatcggcaaaatcccttataaatcaaaagaatagaccgagatagggttgagtgttgttccagtttggaacaagagtccactattaaagaacgtggactccaacgtcaaagggcgaaaaaccgtctatcagggcgatggcccactacgtgaaccatcaccctaatcaagttttttggggtcgaggtgccgtaaagcactaaatcggaaccctaaagggagcccccgatttagagcttgacggggaaagccggcgaacgtggcgagaaaggaagggaagaaagcgaaaggagcgggcgctagggcgctggcaagtgtagcggtcacgctgcgcgtaaccaccacacccgccgcgcttaatgcgccgctacagggcgcgtcaggtggcacttttcggggaaatgtgcgcggaacccctatttgtttatttttctaaatacattcaaatatgtatccgctcatgagacaataaccctgataaatgcttcaataatattgaaaaaggaagaatcctgaggcggaaagaaccagctgtggaatgtgtgtcagttagggtgtggaaagtccccaggctccccagcaggcagaagtatgcaaagcatgcatctcaattagtcagcaaccaggtgtggaaagtccccaggctccccagcaggcagaagtatgcaaagcatgcatctcaattagtcagcaaccatagtcccgcccctaactccgcccatcccgcccctaactccgcccagttccgcccattctccgccccatggctgactaattttttttatttatgcagaggccgaggccgcctcggcctctgagctattccagaagtagtgaggaggcttttttggaggcctaggcttttgcaaagatcgatcaagagacaggatgaggatcgtttcgcatgattgaacaagatggattgcacgcaggttctccggccgcttgggtggagaggctattcggctatgactgggcacaacagacaatcggctgctctgatgccgccgtgttccggctgtcagcgcaggggcgcccggttctttttgtcaagaccgacctgtccggtgccctgaatgaactgcaagacgaggcagcgcggctatcgtggctggccacgacgggcgttccttgcgcagctgtgctcgacgttgtcactgaagcgggaagggactggctgctattgggcgaagtgccggggcaggatctcctgtcatctcaccttgctcctgccgagaaagtatccatcatggctgatgcaatgcggcggctgcatacgcttgatccggctacctgcccattcgaccaccaagcgaaacatcgcatcgagcgagcacgtactcggatggaagccggtcttgtcgatcaggatgatctggacgaagaacatcaggggctcgcgccagccgaactgttcgccaggctcaaggcgagcatgcccgacggcgaggatctcgtcgtgacccatggcgatgcctgcttgccgaatatcatggtggaaaatggccgcttttctggattcatcgactgtggccggctgggtgtggcggaccgctatcaggacatagcgttggctacccgtgatattgctgaagaacttggcggcgaatgggctgaccgcttcctcgtgctttacggtatcgccgctcccgattcgcagcgcatcgccttctatcgccttcttgacgagttcttctgagcgggactctggggttcgaaatgaccgaccaagcgacgcccaacctgccatcacgagatttcgattccaccgccgccttctatgaaaggttgggcttcggaatcgttttccgggacgccggctggatgatcctccagcgcggggatctcatgctggagttcttcgcccaccctagggggaggctaactgaaacacggaaggagacaataccggaaggaacccgcgctatgacggcaataaaaagacagaataaaacgcacggtgttgggtcgtttgttcataaacgcggggttcggtcccagggctggcactctgtcgataccccaccgagaccccattggggccaatacgcccgcgtttcttccttttccccaccccaccccccaagttcgggtgaaggcccagggctcgcagccaacgtcggggcggcaggccctgccatagcctcaggttactcatatatactttagattgatttaaaacttcatttttaatttaaaaggatctaggtgaagatcctttttgataatctcatgaccaaaatcccttaacgtgagttttcgttccactgagcgtcagaccccgtagaaaagatcaaaggatcttcttgagatcctttttttctgcgcgtaatctgctgcttgcaaacaaaaaaaccaccgctaccagcggtggtttgtttgccggatcaagagctaccaactctttttccgaaggtaactggcttcagcagagcgcagataccaaatactgtccttctagtgtagccgtagttaggccaccacttcaagaactctgtagcaccgcctacatacctcgctctgctaatcctgttaccagtggctgctgccagtggcgataagtcgtgtcttaccgggttggactcaagacgatagttaccggataaggcgcagcggtcgggctgaacggggggttcgtgcacacagcccagcttggagcgaacgacctacaccgaactgagatacctacagcgtgagctatgagaaagcgccacgcttcccgaagggagaaaggcggacaggtatccggtaagcggcagggtcggaacaggagagcgcacgagggagcttccagggggaaacgcctggtatctttatagtcctgtcgggtttcgccacctctgacttgagcgtcgatttttgtgatgctcgtcaggggggcggagcctatggaaaaacgccagcaacgcggcctttttacggttcctggccttttgctggccttttgctcacatgttctttcctgcgttatcccctgattctgtggataaccgtattaccgcc

SEQ ID NO: 212 - DNA, 13309 bp, Artificial Sequence
  2G12 pDR12
attgatcataatcagccataccacatttgtagaggttttacttgctttaaaaaacctcccacacctccccctgaacctgaaacataaaatgaatgcaattgttgttgttaacttgtttattgcagcttataatggttacaaataaagcaatagcatcacaaatttcacaaataaagcatttttttcactgcattctagttgtggtttgtccaaactcatcaatgtatcttatcatgtctggatctagcttcgtgtcaaggacggtgactgcagtgaataataaaatgtgtgtttgtccgaaatacgcgttttgagatttctgtcgccgactaaattcatgtcgcgcgatagtggtgtttatcgccgatagagatggcgatattggaaaaatcgatatttgaaaatatggcatattgaaaatgtcgccgatgtgagtttctgtgtaactgatatcgccatttttccaaaagtgatttttgggcatacgcgatatctggcgatagcgcttatatcgtttacgggggatggcgatagacgactttggtgacttgggcgattctgtgtgtcgcaaatatcgcagtttcgatataggtgacagacgatatgaggctatatcgccgatagaggcgacatcaagctggcacatggccaatgcatatcgatctatacattgaatcaatattggccattagccatattattcattggttatatagcataaatcaatattggctattggccattgcatacgttgtatccatatcataatatgtacatttatattggctcatgtccaacattaccgccatgttgacattgattattgactagttattaatagtaatcaattacggggtcattagttcatagcccatatatggagttccgcgttacataacttacggtaaatggcccgcctggctgaccgcccaacgacccccgcccattgacgtcaataatgacgtatgttcccatagtaacgccaatagggactttccattgacgtcaatgggtggagtatttacggtaaactgcccacttggcagtacatcaagtgtatcatatgccaagtacgccccctattgacgtcaatgacggtaaatggcccgcctggcattatgcccagtacatgaccttatgggactttcctacttggcagtacatctacgtattagtcatcgctattaccatggtgatgcggttttggcagtacatcaatgggcgtggatagcggtttgactcacggggatttccaagtctccaccccattgacgtcaatgggagtttgttttggcaccaaaatcaacgggactttccaaaatgtcgtaacaactccgccccattgacgcaaatgggcggtaggcgtgtacggtgggaggtctatataagcacagctcgtttagtgaaccgtcagatcgcctggagacgccatccacgctgttttgacctccatagaagacaccgggaccgatccagcctccgcggccgggaacggtgcattggaacgcggattccccgtgccaagagtgacgtaagtaccgcctatagagtctataggcccacccccttggcttcttatgcatgctatactgtttttggcttggggtctatacacccccgcttcctcatgttataggtgatggtatagcttagcctataggtgtgggttattgaccattattgaccactcccctattggtgacgatactttccattactaatccataacatggctctttgccacaactctctttattggctatatgccaatacactgtccttcagagactgacacggactctgtatttttacaggatggggtctcatttattatttacaaattcacatatacaacaccaccgtccccagtgcccgcagtttttattaaacataacgtgggatctccacgcgaatctcgggtacgtgttccggacatgggctcttctccggtagcggcggagcttctacatccgagccctgctcccatgcctccagcgactcatggtcgctcggcagctccttgctcctaacagtggaggccagacttaggcacagcacgatgcccaccaccaccagtgtgccgcacaaggccgtggcggtagggtatgtgtctgaaaatcagctcggggagcgggcttgcaccgctgacgcatttggaagacttaaggcagcggcagaagaagatgcaggcagctgagttgttgtgttctgataagagtcagaggtaactcccgttgcggtgctgttaacggtggagggcagtgtagtctgagcagtactcgttgctgccgcgcgcgccaccagacataatagctgacagactaacagactgttcctttccatgggtcttttctgcagtcaccgtccttgacacgaagctctagagccgccaccatggaactggggctccgctgggttttccttgttgctattttagaaggtgtccagtgtgaggtgcagctggtggagtctgggggaggcctggtcaaggcgggaggatccctcatactctcctgtggagtctctaattttagaatctctgcccataccatgaattgggtccgccgggttccagggggggggctggagtgggtcgcttccattagtacgagttccacttatagagactatgcagacgctgtgaagggccgattcaccgtttccagagacgacctcgaagactttgtgtatttgcaaatgcacaaaatgagagtcgaagacacggctatttattactgcgccagaaagggatctgacagactaagcgacaacgatccttttgatgcctggggcccagggacagtggtcaccgtctctcccgctagcaccaagggcccatcggtcttccccctggcaccctcctccaagagcacctctgggggcacagcggccctgggctgcctggtcaaggactacttccccgaaccggtgacggtgtcgtggaactcaggcgccctgaccagcggcgtgcacaccttcccggctgtcctacagtcctcaggactctactccctcagcagcgtggtgaccgtgccctccagcagcttgggcacccagacctacatctgcaacgtgaatcacaagcccagcaacaccaaggtggacaagaaagttggtgagaggccagcacagggagggagggtgtctgctggaagccaggctcagcgctcctgcctggacgcatcccggctatgcagccccagtccagggcagcaaggcaggccccgtctgcctcttcacccggaggcctctgcccgccccactcatgctcagggagagggtcttctggctttttccccaggctctgggcaggcacaggctaggtgcccctaacccaggccctgcacacaaaggggcaggtgctgggctcagacctgccaagagccatatccgggaggaccctgcccctgacctaagcccaccccaaaggccaaactctccactccctcagctcggacaccttctctcctcccagattcgagtaactcccaatcttctctctgcagagcccaaatcttgtgacaaaactcacacatgcccaccgtgcccaggtaagccagcccaggcctcgccctccagctcaaggcgggacaggtgccctagagtagcctgcatccagggacaggccccagccgggtgctgacacgtccacctccatctcttcctcagcacctgaactcctggggggaccgtcagtcttcctcttccccccaaaacccaaggacaccctcatgatctcccggacccctgaggtcacatgcgtggtggtggacgtgagccacgaagaccctgaggtcaagttcaactggtacgtggacggcgtggaggtgcataatgccaagacaaagccgcgggaggagcagtacaacagcacgtaccgtgtggtcagcgtcctcaccgtcctgcaccaggactggctgaatggcaaggagtacaagtgcaaggtctccaacaaagccctcccagcccccatcgagaaaaccatctccaaagccaaaggtgggacccgtggggtgcgagggccacatggacagaggccggctcggcccaccctctgccctgagagtgaccgctgtaccaacctctgtccctacagggcagccccgagaaccacaggtgtacaccctgcccccatcccgggatgagctgaccaagaaccaggtcagcctgacctgcctggtcaaaggcttctatcccagcgacatcgccgtggagtgggagagcaatgggcagccggagaacaactacaagaccacgcctcccgtgctggactccgacggctccttcttcctctacagcaagctcaccgtggacaagagcaggtggcagcaggggaacgtcttctcatgctccgtgatgcatgaggctctgcacaaccactacacgcagaagagcctctccctgtctccgggtaaatgagtgcgacggccggcaagccccgctccccgggctctcgcggtcgcacgaggatgcttggcacgtaccccctgtacatacttcccgggcgcccagcatggaaataaagcacccagcgctgccctgggcccctgcgagactgtgatggttctttccacgggtcaggccgagtctgaggcctgagtggcatgagggaggcagagcgggtcccactgtccccacactggcccaggctgtgcaggtgtgcctgggccccctagggtggggctcagccaggggctgccctcggcagggtgggggatttgccagcgtggccctccctccagcagcacctgccctgggctgggccacgggaagccctaggagcccctggggacagacacacagcccctgcctctgtaggagactgtcctgttctgtgagcgcccctgtcctcccgacctccatgcccactcgggggcatgcctagtccatgtgcgtagggacaggccctccctcacccatctacccccacggcactaacccctggctgccctgcccagcctcgcacccgcatggggacacaaccgactccggggacatgcactctcgggccctgtggagggactggtgcagatgcccacacacacactcagcccagacccgttcaacaaaccccgcactgaggttggccggccacacggccaccacacacacacgtgcacgcctcacacacggagcctcacccgggcgaactgcacagcacccagaccagagcaaggtcctcgcacacgtgaacactcctcggacacaggcccccacgagccccacgcggcacctcaaggcccacgagcctctcggcagcttctccacatgctgacctgctcagacaaacccagccctcctctcacaagggtgcccctgcagccgccacacacacacaggggatcacacaccacgtcacgtccctggccctggcccacttcccagtgccgcccttccctgcagacggatcataatcagccataccacatttgtagaggttttacttgctttaaaaaacctcccacacctccccctgaacctgaaacataaaatgaatgcaattgttgttgttaacttgtttattgcagcttataatggttacaaataaagcaatagcatcacaaatttcacaaataaagcatttttttcactgcattctagttgtggtttgtccaaactcatcaatgtatcttatcatgtctggatcagatcctctacgccggacgcatcgtggccggcatcaccggcgccacaggtgcggttgctggcgcctatatcgccgacatcaccgatggggaagatcgggctcgccacttcgggctcatgagcgcttgtttcggcgtgggtatggtggcaggcccgtggccgggggactgttgggcgccatctccttgcatgcaccattccttgcggcggcggtgctcaacggcctcaacctactactgggctgcttcctaatgcaggagtcgcataagggagagcgtcgacctcgggccgcgttgctggcgtttttccataggctccgcccccctgacgagcatcacaaaaatcgacgctcaagtcagaggtggcgaaacccgacaggactataaagataccaggcgtttccccctggaagctccctcgtgcgctctcctgttccgaccctgccgcttaccggatacctgtccgcctttctcccttcgggaagcgtggcgctttctcaatgctcacgctgtaggtatctcagttcggtgtaggtcgttcgctccaagctgggctgtgtgcacgaaccccccgttcagcccgaccgctgcgccttatccggtaactatcgtcttgagtccaacccggtaagacacgacttatcgccactggcagcagccactggtaacaggattagcagagcgaggtatgtaggcggtgctacagagttcttgaagtggtggcctaactacggctacactagaaggacagtatttggtatctgcgctctgctgaagccagttaccttcggaaaaagagttggtagctcttgatccggcaaacaaaccaccgctggtagcggtggtttttttgtttgcaagcagcagattacgcgcagaaaaaaaggatctcaagaagatcctttgatcttttctacggggtctgacgctcagtggaacgaaaactcacgttaagggattttggtcatgagattatcaaaaaggatcttcacctagatccttttaaattaaaaatgaagttttaaatcaatctaaagtatatatgagtaaacttggtctgacagttaccaatgcttaatcagtgaggcacctatctcagcgatctgtctatttcgttcatccatagttgcctgactccccgtcgtgtagataactacgatacgggagggcttaccatctggccccagtgctgcaatgataccgcgagacccacgctcaccggctccagatttatcagcaataaaccagccagccggaagggccgagcgcagaagtggtcctgcaactttatccgcctccatccagtctattaattgttgccgggaagctagagtaagtagttcgccagttaatagtttgcgcaacgttgttgccattgctacaggcatcgtggtgtcacgctcgtcgtttggtatggcttcattcagctccggttcccaacgatcaaggcgagttacatgatcccccatgttgtgcaaaaaagcggttagctccttcggtcctccgatcgttgtcagaagtaagttggccgcagtgttatcactcatggttatggcagcactgcatcttactgtcatgccatccgtaagatgcttttctgtgactggtgagtactcaaccaagtcattctgagaatagtgtatgcggcgaccgagttgctcttgcccggcgtcaacacgggataataccgcgccacatagcagaactttaaaagtgctcatcattggaaaacgttcttcggggcgaaaactctcaaggatcttaccgctgttgagatccagttcgatgtaacccactcgtgcacccaactgatcttcagcatcttttactttcaccagcgtttctgggtgagcaaaaacaggaaggcaaaatgccgcaaaaaagggaataagggcgacacggaaatgttgaatactcatactcttcctttttcaatattattgaagcatttatcagggttattgtctcatgagcggatacatatttgaatgtatttagaaaaataaacaaataggggttccgcgcacatttccccgaaaagtgccacctgacgtctaagaaaccattattatcatgacattaacctataaaaataggcgtatcacgaggccctgatggctctttgcggcacccatcgttcgtaatgttccgtggcaccgaggacaaccctcaagagaaaatgtaatcacactggctcaccttcgggtgggcctttctgcgtttataaggagacactttatgtttaagaaggttggtaaattccttgcggctttggcagccaagctagatccggctgtggaatgtgtgtcagttagggtgtggaaagtccccaggctccccagcaggcagaagtatgcaaagcatgcatctcaattagtcagcaaccaggctccccagcaggcagaagtatgcaaagcatgcatctcaattagtcagcaaccatagtcccgcccctaactccgcccatcccgcccctaactccgcccagttccgcccattctccgccccatggctgactaattttttttatttatgcagaggccgaggccgcctcggcctctgagctattccagaagtagtgaggaggcttttttggaggcctaggcttttgcaaaaacctagcttggggccaccgctcagagcaccttccaccatggccacctcagcaagttcccacttgaacaaaaacatcaagcaaatgtacttgtgcctgccccagggtgagaaagtccaagccatgtatatctgggttgatggtactggagaaggactgcgctgcaaaacccgcaccctggactgtgagcccaagtgtgtagaagagttacctgagtggaattttgatggctctagtacctttcagtctgagggctccaacagtgacatgtatctcagccctgttgccatgtttcgggaccccttccgcagagatcccaacaagctggtgttctgtgaagttttcaagtacaaccggaagcctgcagagaccaatttaaggcactcgtgtaaacggataatggacatggtgagcaaccagcacccctggtttggaatggaacaggagtatactctgatgggaacagatgggcacccttttggttggccttccaatggctttcctgggccccaaggtccgtattactgtggtgtgggcgcagacaaagcctatggcagggatatcgtggaggctcactaccgcgcctgcttgtatgctggggtcaagattacaggaacaaatgctgaggtcatgcctgcccagtgggagttccaaataggaccctgtgaaggaatccgcatgggagatcatctctgggtggcccgtttcatcttgcatcgagtatgtgaagactttggggtaatagcaacctttgaccccaagcccattcctgggaactggaatggtgcaggctgccataccaactttagcaccaaggccatgcgggaggagaatggtctgaagcacatcgaggaggccatcgagaaactaagcaagcggcaccggtaccacattcgagcctacgatcccaaggggggcctggacaatgcccgtcgtctgactgggttccacgaaacgtccaacatcaacgacttttctgctggtgtcgccaatcgcagtgccagcatccgcattccccggactgtcggccaggagaagaaaggttactttgaagaccgccgcccctctgccaattgtgacccctttgcagtgacagaagccatcgtccgcacatgccttctcaatgagactggcgacgagcccttccaatacaaaaactaattagactttgagtgatcttgagcctttcctagttcatcccaccccgccccagagagatctttgtgaaggaaccttacttctgtggtgtgacataattggacaaactacctacagagatttaaagctctaaggtaaatataaaatttttaagtgtataatgtgttaaactactgattctaattgtttgtgtattttagattccaacctatggaactgatgaatgggagcagtggtggaatgcctttaatgaggaaaacctgttttgctcagaagaaatgccatctagtgatgatgaggctactgctgactctcaacattctactcctccaaaaaagaagagaaaggtagaagaccccaaggactttccttcagaattgctaagttttttgagtcatgctgtgtttagtaatagaactcttgcttgctttgctatttacaccacaaaggaaaaagctgcactgctatacaagaaaattatggaaaaatattctgtaacctttataagtaggcataacagttataatcataacatactgttttttcttactccacacaggcatagagtgtctgctattaataactatgctcaaaaattgtgtacctttagctttttaatttgtaaaggggttaataaggaatatttgatgtatagtgccttgactagagatcataatcagccataccacatttgtagaggttttacttgctttaaaaaacctcccacacctccccctgaacctgaaacataaaatgaatgcaattgttgttgttaacttgtttattgcagcttataatggttacaaataaagcaatagcatcacaaatttcacaaataaagcatttttttcactgcattctagttgtggtttgtccaaactcatcaatgtatcttatcatgtctggatctagcttcgtgtcaaggacggtgactgcagtgaataataaaatgtgtgtttgtccgaaatacgcgttttgagatttctgtcgccgactaaattcatgtcgcgcgatagtggtgtttatcgccgatagagatggcgatattggaaaaatcgatatttgaaaatatggcatattgaaaatgtcgccgatgtgagtttctgtgtaactgatatcgccatttttccaaaagtgatttttgggcatacgcgatatctggcgatagcgcttatatcgtttacgggggatggcgatagacgactttggtgacttgggcgattctgtgtgtcgcaaatatcgcagtttcgatataggtgacagacgatatgaggctatatcgccgatagaggcgacatcaagctggcacatggccaatgcatatcgatctatacattgaatcaatattggccattagccatattattcattggttatatagcataaatcaatattggctattggccattgcatacgttgtatccatatcataatatgtacatttatattggctcatgtccaacattaccgccatgttgacattgattattgactagttattaatagtaatcaattacggggtcattagttcatagcccatatatggagttccgcgttacataacttacggtaaatggcccgcctggctgaccgcccaacgacccccgcccattgacgtcaataatgacgtatgttcccatagtaacgccaatagggactttccattgacgtcaatgggtggagtatttacggtaaactgcccacttggcagtacatcaagtgtatcatatgccaagtacgccccctattgacgtcaatgacggtaaatggcccgcctggcattatgcccagtacatgaccttatgggactttcctacttggcagtacatctacgtattagtcatcgctattaccatggtgatgcggttttggcagtacatcaatgggcgtggatagcggtttgactcacggggatttccaagtctccaccccattgacgtcaatgggagtttgttttggcaccaaaatcaacgggactttccaaaatgtcgtaacaactccgccccattgacgcaaatgggcggtaggcgtgtacggtgggaggtctatataagcacagctcgtttagtgaaccgtcagatcgcctggagacgccatccacgctgttttgacctccatagaagacaccgggaccgatccagcctccgcggccgggaacggtgcattggaacgcggattccccgtgccaagagtgacgtaagtaccgcctatagagtctataggcccacccccttggcttcttatgcatgctatactgtttttggcttggggtctatacacccccgcttcctcatgttataggtgatggtatagcttagcctataggtgtgggttattgaccattattgaccactcccctattggtgacgatactttccattactaatccataacatggctctttgccacaactctctttattggctatatgccaatacactgtccttcagagactgacacggactctgtatttttacaggatggggtctcatttattatttacaaattcacatatacaacaccaccgtccccagtgcccgcagtttttattaaacataacgtgggatctccacgcgaatctcgggtacgtgttccggacatgggctcttctccggtagcggcggagcttctacatccgagccctgctcccatgcctccagcgactcatggtcgctcggcagctccttgctcctaacagtggaggccagacttaggcacagcacgatgcccaccaccaccagtgtgccgcacaaggccgtggcggtagggtatgtgtctgaaaatcagctcggggagcgggcttgcaccgctgacgcatttggaagacttaaggcagcggcagaagaagatgcaggcagctgagttgttgtgttctgataagagtcagaggtaactcccgttgcggtgctgttaacggtggagggcagtgtagtctgagcagtactcgttgctgccgcgcgcgccaccagacataatagctgacagactaacagactgttcctttccatgggtcttttctgcagtcaccgtccttgacacgaagcttaccatggacatgagggtccccgctcagctcctggggctcctgctgctctggctcccaggtaaggaaggagaacactaggaatttactcagcccagtgtgctcagtactgcctggttattcagggaagtcttcctataatatgatcaatagtatgaatatttgtgtttctatttccaatctcaggtgccaaatgtgatgttgtgatgactcagtctccttccaccctgtctgcatctgtcggagacacaatcaccatcacttgccgggccagtcagagtattgaaacctggttggcctggtatcagcagaagccagggaaagccccaaaactcctaatctacaaggcgtctactttaaaaactggagtcccgtcaagattcagcggcagtggatctggaacagagttcactcttaccatcagtggcctgcagttcgatgactttgcaacttatcactgtcagcactatgctggttattcagccacttttggccagggaaccagggtggagatcaaacgtactgtggctgcaccatctgtcttcatcttcccgccatctgatgagcagttgaaatctgggactgcctctgttgtgtgcctgctgaataacttctatcccagagaggccaaagtacagtggaaggtggataacgccctccaatcgggtaactcccaggagagtgtcacagagcaggacagcaaggacagcacctacagcctcagcagcaccctgacgttgagcaaagcagactacgagaaacacaaagtctacgcctgcgaagtcacccatcagggcctgagttcgcccgtcacaaagagcttcaacaggggagagtgttaatgaattc

SEQ ID NO: 213 - DNA, 42 bp, Artificial Sequence; identical to SEQ ID NO: 199
  2G12LCF1

SEQ ID NO: 214 - DNA, 24 bp, Artificial Sequence
  QHYA-R
gcagtggtaggtagcgaagtcgtc

SEQ ID NO: 215 - DNA, 70 bp, Artificial Sequence
  2G12 REFERENCE qhya
gacgacttcgcgacctaccactgccagcactacgctggttactctgctaccttcggtcagggtacccgtg

SEQ ID NO: 216 - DNA, 70 bp, Artificial Sequence
  LCDR3-QHYA5'
  variation 25-26, 28-29, 31-32, 34-35: n = a, c, t or g
  variation 27, 30, 33, 36: k = g or t
gacgacttcgcgacctaccactgcnnknnknnknnkggttactctgctaccttcggtcagggtacccgtg

SEQ ID NO: 217 - DNA, 48 bp, Artificial Sequence; identical to SEQ ID NO: 19
  2G12LCR3

SEQ ID NO: 218 - protein, 9 aa, Artificial Sequence
  anti-C. albicans 2G12 variant CDRL3
QHYREWRAT

SEQ ID NO: 219 - protein, 9 aa, Artificial Sequence
  anti-C. albicans 2G12 variant CDRL3
QHYREFNAT

SEQ ID NO: 220 - protein, 9 aa, Artificial Sequence
  anti-C. albicans 2G12 variant CDRL3
QHYREFHAT

SEQ ID NO: 221 - protein, 9 aa, Artificial Sequence
  anti-C. albicans 2G12 variant CDRL3
QHYRPWSAT

SEQ ID NO: 222 - protein, 9 aa, Artificial Sequence
  anti-C. albicans 2G12 variant CDRL3
QHYMPFNAS

SEQ ID NO: 223 - protein, 9 aa, Artificial Sequence
  anti-C. albicans 2G12 variant CDRL3
QHYIPFEAT

SEQ ID NO: 224 - protein, 9 aa, Artificial Sequence
  anti-C. albicans 2G12 variant CDRL3
QHYLPFQAT

SEQ ID NO: 225 - protein, 9 aa, Artificial Sequence
  anti-C. albicans 2G12 variant CDRL3
QHYIPFSAT

SEQ ID NO: 226 - protein, 9 aa, Artificial Sequence
  anti-C. albicans 2G12 variant CDRL3
QHYQPFHAT

SEQ ID NO: 227 - protein, 9 aa, Artificial Sequence
  anti-C. albicans 2G12 variant CDRL3
QHYQPFRAT

SEQ ID NO: 228 - protein, 9 aa, Artificial Sequence
  anti-C. albicans 2G12 variant CDRL3
QHYVPFKAT

SEQ ID NO: 229 - protein, 9 aa, Artificial Sequence
  anti-C. albicans 2G12 variant CDRL3
QHYLPFKAT

SEQ ID NO: 230 - protein, 9 aa, Artificial Sequence
  anti-C. albicans 2G12 variant CDRL3
QHYKPFWAT

SEQ ID NO: 231 - protein, 9 aa, Artificial Sequence
  anti-C. albicans 2G12 variant CDRL3
QHYQPFVAT

SEQ ID NO: 232 - protein, 9 aa, Artificial Sequence
  anti-C. albicans 2G12 variant CDRL3
QHYRPWWAT

SEQ ID NO: 233 - protein, 9 aa, Artificial Sequence
  anti-C. albicans 2G12 variant CDRL3
QHYLPWWAT

SEQ ID NO: 234 - protein, 9 aa, Artificial Sequence
  anti-C. albicans 2G12 variant CDRL3
QHYMPYSAT

SEQ ID NO: 235 - protein, 9 aa, Artificial Sequence
  anti-C. albicans 2G12 variant CDRL3
QHYQPYSAT

SEQ ID NO: 236 - protein, 9 aa, Artificial Sequence
  anti-C. albicans 2G12 variant CDRL3
QHYEPYVAT

SEQ ID NO: 237 - protein, 9 aa, Artificial Sequence
  anti-C. albicans 2G12 variant CDRL3
QHYMPYKAT

SEQ ID NO: 238 - protein, 9 aa, Artificial Sequence
  anti-C. albicans 2G12 variant CDRL3
QHYMPYNAT

SEQ ID NO: 239 - protein, 9 aa, Artificial Sequence
  anti-C. albicans 2G12 variant CDRL3
QHYQPYNAT

SEQ ID NO: 240 - protein, 9 aa, Artificial Sequence
  anti-C. albicans 2G12 variant CDRL3
QHYLPYNAS

SEQ ID NO: 241 - protein, 9 aa, Artificial Sequence
  anti-C. albicans 2G12 variant CDRL3
QHYSPYWAT

SEQ ID NO: 242 - protein, 9 aa, Artificial Sequence
  anti-C. albicans 2G12 variant CDRL3
QHYLPYEAS

SEQ ID NO: 243 - protein, 9 aa, Artificial Sequence
  anti-C. albicans 2G12 variant CDRL3
QHYEPYLAT

SEQ ID NO: 244 - protein, 9 aa, Artificial Sequence
  anti-C. albicans 2G12 variant CDRL3
QHYLPFGAS

SEQ ID NO: 245 - protein, 9 aa, Artificial Sequence
  anti-C. albicans 2G12 variant CDRL3
QHYKDFSAT

SEQ ID NO: 246 - protein, 9 aa, Artificial Sequence
  anti-C. albicans 2G12 variant CDRL3
QHYMAYQAT

SEQ ID NO: 247 - protein, 9 aa, Artificial Sequence
  anti-C. albicans 2G12 variant CDRL3
QHYQAFNAT

SEQ ID NO: 248 - protein, 9 aa, Artificial Sequence
  anti-C. albicans 2G12 variant CDRL3
NPLSGYSAT

SEQ ID NO: 249 - protein, 215 aa, Artificial Sequence
  anti-C. albicans 2G12 light chain variant
AGVVMTQSPSTLSASVGDTITITCRASQSIETWLAWYQQKPGKAPKLLIYKASTLKTGVPSRFSGSGSGTEFTLTISGLQFDDFATYHCQHYREWRATFGQGTRVEIKRTVAAPSVFIFPPSDEQLKSGTASVVCLLNNFYPREAKVQWKVDNALQSGNSQESVTEQDSKDSTYSLSSTLTLSKADYEKHKVYACEVTHQGLSSPVTKSFNRGEC

SEQ ID NO: 250 - protein, 215 aa, Artificial Sequence
  anti-C. albicans 2G12 light chain variant
AGVVMTQSPSTLSASVGDTITITCRASQSIETWLAWYQQKPGKAPKLLIYKASTLKTGVPSRFSGSGSGTEFTLTISGLQFDDFATYHCQHYREFNATFGQGTRVEIKRTVAAPSVFIFPPSDEQLKSGTASVVCLLNNFYPREAKVQWKVDNALQSGNSQESVTEQDSKDSTYSLSSTLTLSKADYEKHKVYACEVTHQGLSSPVTKSFNRGEC

SEQ ID NO: 251 - protein, 215 aa, Artificial Sequence
  anti-C. albicans 2G12 light chain variant
AGVVMTQSPSTLSASVGDTITITCRASQSIETWLAWYQQKPGKAPKLLIYKASTLKTGVPSRFSGSGSGTEFTLTISGLQFDDFATYHCQHYREFHATFGQGTRVEIKRTVAAPSVFIFPPSDEQLKSGTASVVCLLNNFYPREAKVQWKVDNALQSGNSQESVTEQDSKDSTYSLSSTLTLSKADYEKHKVYACEVTHQGLSSPVTKSFNRGEC

SEQ ID NO: 252 - protein, 215 aa, Artificial Sequence
  anti-C. albicans 2G12 light chain variant
AGVVMTQSPSTLSASVGDTITITCRASQSIETWLAWYQQKPGKAPKLLIYKASTLKTGVPSRFSGSGSGTEFTLTISGLQFDDFATYHCQHYRPWSATFGQGTRVEIKRTVAAPSVFIFPPSDEQLKSGTASVVCLLNNFYPREAKVQWKVDNALQSGNSQESVTEQDSKDSTYSLSSTLTLSKADYEKHKVYACEVTHQGLSSPVTKSFNRGEC

SEQ ID NO: 253 - protein, 215 aa, Artificial Sequence
  anti-C. albicans 2G12 light chain variant
AGVVMTQSPSTLSASVGDTITITCRASQSIETWLAWYQQKPGKAPKLLIYKASTLKTGVPSRFSGSGSGTEFTLTISGLQFDDFATYHCQHYMPFNASFGQGTRVEIKRTVAAPSVFIFPPSDEQLKSGTASVVCLLNNFYPREAKVQWKVDNALQSGNSQESVTEQDSKDSTYSLSSTLTLSKADYEKHKVYACEVTHQGLSSPVTKSFNRGEC

SEQ ID NO: 254 - protein, 215 aa, Artificial Sequence
  anti-C. albicans 2G12 light chain variant
AGVVMTQSPSTLSASVGDTITITCRASQSIETWLAWYQQKPGKAPKLLIYKASTLKTGVPSRFSGSGSGTEFTLTISGLQFDDFATYHCQHYIPFEATFGQGTRVEIKRTVAAPSVFIFPPSDEQLKSGTASVVCLLNNFYPREAKVQWKVDNALQSGNSQESVTEQDSKDSTYSLSSTLTLSKADYEKHKVYACEVTHQGLSSPVTKSFNRGEC

SEQ ID NO: 255 - protein, 215 aa, Artificial Sequence
  anti-C. albicans 2G12 light chain variant
AGVVMTQSPSTLSASVGDTITITCRASQSIETWLAWYQQKPGKAPKLLIYKASTLKTGVPSRFSGSGSGTEFTLTISGLQFDDFATYHCQHYLPFQATFGQGTRVEIKRTVAAPSVFIFPPSDEQLKSGTASVVCLLNNFYPREAKVQWKVDNALQSGNSQESVTEQDSKDSTYSLSSTLTLSKADYEKHKVYACEVTHQGLSSPVTKSFNRGEC

SEQ ID NO: 256 - protein, 215 aa, Artificial Sequence
  anti-C. albicans 2G12 light chain variant
AGVVMTQSPSTLSASVGDTITITCRASQSIETWLAWYQQKPGKAPKLLIYKASTLKTGVPSRFSGSGSGTEFTLTISGLQFDDFATYHCQHYIPFSATFGQGTRVEIKRTVAAPSVFIFPPSDEQLKSGTASVVCLLNNFYPREAKVQWKVDNALQSGNSQESVTEQDSKDSTYSLSSTLTLSKADYEKHKVYACEVTHQGLSSPVTKSFNRGEC

SEQ ID NO: 257 - protein, 215 aa, Artificial Sequence
  anti-C. albicans 2G12 light chain variant
AGVVMTQSPSTLSASVGDTITITCRASQSIETWLAWYQQKPGKAPKLLIYKASTLKTGVPSRFSGSGSGTEFTLTISGLQFDDFATYHCQHYQPFHATFGQGTRVEIKRTVAAPSVFIFPPSDEQLKSGTASVVCLLNNFYPREAKVQWKVDNALQSGNSQESVTEQDSKDSTYSLSSTLTLSKADYEKHKVYACEVTHQGLSSPVTKSFNRGEC

SEQ ID NO: 258 - protein, 215 aa, Artificial Sequence
  anti-C. albicans 2G12 light chain variant
AGVVMTQSPSTLSASVGDTITITCRASQSIETWLAWYQQKPGKAPKLLIYKASTLKTGVPSRFSGSGSGTEFTLTISGLQFDDFATYHCQHYQPFRATFGQGTRVEIKRTVAAPSVFIFPPSDEQLKSGTASVVCLLNNFYPREAKVQWKVDNALQSGNSQESVTEQDSKDSTYSLSSTLTLSKADYEKHKVYACEVTHQGLSSPVTKSFNRGEC

SEQ ID NO: 259 - protein, 215 aa, Artificial Sequence
  anti-C. albicans 2G12 light chain variant
AGVVMTQSPSTLSASVGDTITITCRASQSIETWLAWYQQKPGKAPKLLIYKASTLKTGVPSRFSGSGSGTEFTLTISGLQFDDFATYHCQHYVPFKATFGQGTRVEIKRTVAAPSVFIFPPSDEQLKSGTASVVCLLNNFYPREAKVQWKVDNALQSGNSQESVTEQDSKDSTYSLSSTLTLSKADYEKHKVYACEVTHQGLSSPVTKSFNRGEC

SEQ ID NO: 260 - protein, 215 aa, Artificial Sequence
  anti-C. albicans 2G12 light chain variant
AGVVMTQSPSTLSASVGDTITITCRASQSIETWLAWYQQKPGKAPKLLIYKASTLKTGVPSRFSGSGSGTEFTLTISGLQFDDFATYHCQHYLPFKATFGQGTRVEIKRTVAAPSVFIFPPSDEQLKSGTASVVCLLNNFYPREAKVQWKVDNALQSGNSQESVTEQDSKDSTYSLSSTLTLSKADYEKHKVYACEVTHQGLSSPVTKSFNRGEC

SEQ ID NO: 261 - protein, 215 aa, Artificial Sequence
  anti-C. albicans 2G12 light chain variant
AGVVMTQSPSTLSASVGDTITITCRASQSIETWLAWYQQKPGKAPKLLIYKASTLKTGVPSRFSGSGSGTEFTLTISGLQFDDFATYHCQHYKPFWATFGQGTRVEIKRTVAAPSVFIFPPSDEQLKSGTASVVCLLNNFYPREAKVQWKVDNALQSGNSQESVTEQDSKDSTYSLSSTLTLSKADYEKHKVYACEVTHQGLSSPVTKSFNRGEC

SEQ ID NO: 262 - protein, 215 aa, Artificial Sequence
  anti-C. albicans 2G12 light chain variant
AGVVMTQSPSTLSASVGDTITITCRASQSIETWLAWYQQKPGKAPKLLIYKASTLKTGVPSRFSGSGSGTEFTLTISGLQFDDFATYHCQHYQPFVATFGQGTRVEIKRTVAAPSVFIFPPSDEQLKSGTASVVCLLNNFYPREAKVQWKVDNALQSGNSQESVTEQDSKDSTYSLSSTLTLSKADYEKHKVYACEVTHQGLSSPVTKSFNRGEC

SEQ ID NO: 263 - protein, 215 aa, Artificial Sequence
  anti-C. albicans 2G12 light chain variant
AGVVMTQSPSTLSASVGDTITITCRASQSIETWLAWYQQKPGKAPKLLIYKASTLKTGVPSRFSGSGSGTEFTLTISGLQFDDFATYHCQHYRPWWATFGQGTRVEIKRTVAAPSVFIFPPSDEQLKSGTASVVCLLNNFYPREAKVQWKVDNALQSGNSQESVTEQDSKDSTYSLSSTLTLSKADYEKHKVYACEVTHQGLSSPVTKSFNRGEC

SEQ ID NO: 264 - protein, 215 aa, Artificial Sequence
  anti-C. albicans 2G12 light chain variant
AGVVMTQSPSTLSASVGDTITITCRASQSIETWLAWYQQKPGKAPKLLIYKASTLKTGVPSRFSGSGSGTEFTLTISGLQFDDFATYHCQHYLPWWATFGQGTRVEIKRTVAAPSVFIFPPSDEQLKSGTASVVCLLNNFYPREAKVQWKVDNALQSGNSQESVTEQDSKDSTYSLSSTLTLSKADYEKHKVYACEVTHQGLSSPVTKSFNRGEC

SEQ ID NO: 265 - protein, 215 aa, Artificial Sequence
  anti-C. albicans 2G12 light chain variant
AGVVMTQSPSTLSASVGDTITITCRASQSIETWLAWYQQKPGKAPKLLIYKASTLKTGVPSRFSGSGSGTEFTLTISGLQFDDFATYHCQHYMPYSATFGQGTRVEIKRTVAAPSVFIFPPSDEQLKSGTASVVCLLNNFYPREAKVQWKVDNALQSGNSQESVTEQDSKDSTYSLSSTLTLSKADYEKHKVYACEVTHQGLSSPVTKSFNRGEC

SEQ ID NO: 266 - protein, 215 aa, Artificial Sequence
  anti-C. albicans 2G12 light chain variant
AGVVMTQSPSTLSASVGDTITITCRASQSIETWLAWYQQKPGKAPKLLIYKASTLKTGVPSRFSGSGSGTEFTLTISGLQFDDFATYHCQHYQPYSATFGQGTRVEIKRTVAAPSVFIFPPSDEQLKSGTASVVCLLNNFYPREAKVQWKVDNALQSGNSQESVTEQDSKDSTYSLSSTLTLSKADYEKHKVYACEVTHQGLSSPVTKSFNRGEC

SEQ ID NO: 267 - protein, 215 aa, Artificial Sequence
  anti-C. albicans 2G12 light chain variant
AGVVMTQSPSTLSASVGDTITITCRASQSIETWLAWYQQKPGKAPKLLIYKASTLKTGVPSRFSGSGSGTEFTLTISGLQFDDFATYHCQHYEPYVATFGQGTRVEIKRTVAAPSVFIFPPSDEQLKSGTASVVCLLNNFYPREAKVQWKVDNALQSGNSQESVTEQDSKDSTYSLSSTLTLSKADYEKHKVYACEVTHQGLSSPVTKSFNRGEC

SEQ ID NO: 268 - protein, 215 aa, Artificial Sequence
  anti-C. albicans 2G12 light chain variant
AGVVMTQSPSTLSASVGDTITITCRASQSIETWLAWYQQKPGKAPKLLIYKASTLKTGVPSRFSGSGSGTEFTLTISGLQFDDFATYHCQHYMPYKATFGQGTRVEIKRTVAAPSVFIFPPSDEQLKSGTASVVCLLNNFYPREAKVQWKVDNALQSGNSQESVTEQDSKDSTYSLSSTLTLSKADYEKHKVYACEVTHQGLSSPVTKSFNRGEC

SEQ ID NO: 269 - protein, 215 aa, Artificial Sequence
  anti-C. albicans 2G12 light chain variant
AGVVMTQSPSTLSASVGDTITITCRASQSIETWLAWYQQKPGKAPKLLIYKASTLKTGVPSRFSGSGSGTEFTLTISGLQFDDFATYHCQHYMPYNATFGQGTRVEIKRTVAAPSVFIFPPSDEQLKSGTASVVCLLNNFYPREAKVQWKVDNALQSGNSQESVTEQDSKDSTYSLSSTLTLSKADYEKHKVYACEVTHQGLSSPVTKSFNRGEC

SEQ ID NO: 270 - protein, 215 aa, Artificial Sequence
  anti-C. albicans 2G12 light chain variant
AGVVMTQSPSTLSASVGDTITITCRASQSIETWLAWYQQKPGKAPKLLIYKASTLKTGVPSRFSGSGSGTEFTLTISGLQFDDFATYHCQHYQPYNATFGQGTRVEIKRTVAAPSVFIFPPSDEQLKSGTASVVCLLNNFYPREAKVQWKVDNALQSGNSQESVTEQDSKDSTYSLSSTLTLSKADYEKHKVYACEVTHQGLSSPVTKSFNRGEC

SEQ ID NO: 271 - protein, 215 aa, Artificial Sequence
  anti-C. albicans 2G12 light chain variant
AGVVMTQSPSTLSASVGDTITITCRASQSIETWLAWYQQKPGKAPKLLIYKASTLKTGVPSRFSGSGSGTEFTLTISGLQFDDFATYHCQHYLPYNASFGQGTRVEIKRTVAAPSVFIFPPSDEQLKSGTASVVCLLNNFYPREAKVQWKVDNALQSGNSQESVTEQDSKDSTYSLSSTLTLSKADYEKHKVYACEVTHQGLSSPVTKSFNRGEC

SEQ ID NO: 272 - protein, 215 aa, Artificial Sequence
  anti-C. albicans 2G12 light chain variant
AGVVMTQSPSTLSASVGDTITITCRASQSIETWLAWYQQKPGKAPKLLIYKASTLKTGVPSRFSGSGSGTEFTLTISGLQFDDFATYHCQHYSPYWATFGQGTRVEIKRTVAAPSVFIFPPSDEQLKSGTASVVCLLNNFYPREAKVQWKVDNALQSGNSQESVTEQDSKDSTYSLSSTLTLSKADYEKHKVYACEVTHQGLSSPVTKSFNRGEC

SEQ ID NO: 273 - protein, 215 aa, Artificial Sequence
  anti-C. albicans 2G12 light chain variant
AGVVMTQSPSTLSASVGDTITITCRASQSIETWLAWYQQKPGKAPKLLIYKASTLKTGVPSRFSGSGSGTEFTLTISGLQFDDFATYHCQHYLPYEASFGQGTRVEIKRTVAAPSVFIFPPSDEQLKSGTASVVCLLNNFYPREAKVQWKVDNALQSGNSQESVTEQDSKDSTYSLSSTLTLSKADYEKHKVYACEVTHQGLSSPVTKSFNRGEC

SEQ ID NO: 274 - protein, 215 aa, Artificial Sequence
  anti-C. albicans 2G12 light chain variant
AGVVMTQSPSTLSASVGDTITITCRASQSIETWLAWYQQKPGKAPKLLIYKASTLKTGVPSRFSGSGSGTEFTLTISGLQFDDFATYHCQHYEPYLATFGQGTRVEIKRTVAAPSVFIFPPSDEQLKSGTASVVCLLNNFYPREAKVQWKVDNALQSGNSQESVTEQDSKDSTYSLSSTLTLSKADYEKHKVYACEVTHQGLSSPVTKSFNRGEC

SEQ ID NO: 275 - protein, 215 aa, Artificial Sequence
  anti-C. albicans 2G12 light chain variant
AGVVMTQSPSTLSASVGDTITITCRASQSIETWLAWYQQKPGKAPKLLIYKASTLKTGVPSRFSGSGSGTEFTLTISGLQFDDFATYHCQHYLPFGASFGQGTRVEIKRTVAAPSVFIFPPSDEQLKSGTASVVCLLNNFYPREAKVQWKVDNALQSGNSQESVTEQDSKDSTYSLSSTLTLSKADYEKHKVYACEVTHQGLSSPVTKSFNRGEC

SEQ ID NO: 276 - protein, 215 aa, Artificial Sequence
  anti-C. albicans 2G12 light chain variant
AGVVMTQSPSTLSASVGDTITITCRASQSIETWLAWYQQKPGKAPKLLIYKASTLKTGVPSRFSGSGSGTEFTLTISGLQFDDFATYHCQHYKDFSATFGQGTRVEIKRTVAAPSVFIFPPSDEQLKSGTASVVCLLNNFYPREAKVQWKVDNALQSGNSQESVTEQDSKDSTYSLSSTLTLSKADYEKHKVYACEVTHQGLSSPVTKSFNRGEC

SEQ ID NO: 277 - protein, 215 aa, Artificial Sequence
  anti-C. albicans 2G12 light chain variant
AGVVMTQSPSTLSASVGDTITITCRASQSIETWLAWYQQKPGKAPKLLIYKASTLKTGVPSRFSGSGSGTEFTLTISGLQFDDFATYHCQHYMAYQATFGQGTRVEIKRTVAAPSVFIFPPSDEQLKSGTASVVCLLNNFYPREAKVQWKVDNALQSGNSQESVTEQDSKDSTYSLSSTLTLSKADYEKHKVYACEVTHQGLSSPVTKSFNRGEC

SEQ ID NO: 278 - protein, 215 aa, Artificial Sequence
  anti-C. albicans 2G12 light chain variant
AGVVMTQSPSTLSASVGDTITITCRASQSIETWLAWYQQKPGKAPKLLIYKASTLKTGVPSRFSGSGSGTEFTLTISGLQFDDFATYHCQHYQAFNATFGQGTRVEIKRTVAAPSVFIFPPSDEQLKSGTASVVCLLNNFYPREAKVQWKVDNALQSGNSQESVTEQDSKDSTYSLSSTLTLSKADYEKHKVYACEVTHQGLSSPVTKSFNRGEC

SEQ ID NO: 279 - protein, 215 aa, Artificial Sequence
  anti-C. albicans 2G12 light chain variant
AGVVMTQSPSTLSASVGDTITITCRASQSIETWLAWYQQKPGKAPKLLIYKASTLKTGVPSRFSGSGSGTEFTLTISGLQFDDFATYHCNPLSGYSATFGQGTRVEIKRTVAAPSVFIFPPSDEQLKSGTASVVCLLNNFYPREAKVQWKVDNALQSGNSQESVTEQDSKDSTYSLSSTLTLSKADYEKHKVYACEVTHQGLSSPVTKSFNRGEC

SEQ ID NO: 280 - protein, 9 aa, Artificial Sequence
  anti-C. albicans 2G12 variant CDR3
QHYKPFSAT

SEQ ID NO: 281 - protein, 9 aa, Artificial Sequence
  anti-C. albicans 2G12 variant CDR3
QHYMPFRAT

SEQ ID NO: 282 - protein, 215 aa, Artificial Sequence
  anti-C. albicans 2G12 light chain variant
AGVVMTQSPSTLSASVGDTITITCRASQSIETWLAWYQQKPGKAPKLLIYKASTLKTGVPSRFSGSGSGTEFTLTISGLQFDDFATYHCQHYKPFSATFGQGTRVEIKRTVAAPSVFIFPPSDEQLKSGTASVVCLLNNFYPREAKVQWKVDNALQSGNSQESVTEQDSKDSTYSLSSTLTLSKADYEKHKVYACEVTHQGLSSPVTKSFNRGEC

SEQ ID NO: 283 - protein, 215 aa, Artificial Sequence
  anti-C. albicans 2G12 light chain variant
AGVVMTQSPSTLSASVGDTITITCRASQSIETWLAWYQQKPGKAPKLLIYKASTLKTGVPSRFSGSGSGTEFTLTISGLQFDDFATYHCQHYMPFRATFGQGTRVEIKRTVAAPSVFIFPPSDEQLKSGTASVVCLLNNFYPREAKVQWKVDNALQSGNSQESVTEQDSKDSTYSLSSTLTLSKADYEKHKVYACEVTHQGLSSPVTKSFNRGEC

SEQ ID NO: 284 - protein, 330 aa, Homo sapiens [sequence omitted]

SEQ ID NO: 285 - DNA, 26 bp, Artificial Sequence
  DraIIICmR-F1
ggtgatggttcacgtagtgggccatc

SEQ ID NO: 286 - DNA, 51 bp, Artificial Sequence
  CmR-R1
tatccagtgatttttttctccatactcttcctttttcaatattattgaagc

SEQ ID NO: 287 - DNA, 51 bp, Artificial Sequence
  CmR-F2
gcttcaataatattgaaaaaggaagagtatggagaaaaaaatcactggata

SEQ ID NO: 288 - DNA, 49 bp, Artificial Sequence
  CmR-R2
gtatatatgagtaaacttggtctgacagttacgccccgccctgccactc

SEQ ID NO: 289 - DNA, 49 bp, Artificial Sequence
  CmR-F3
gagtggcagggcggggcgtaactgtcagaccaagtttactcatatatac

SEQ ID NO: 290 - DNA, 27 bp, Artificial Sequence
  PciICmR-R3
cgcaggaaagaacatgtgagcaaaagg

SEQ ID NO: 291 - DNA, 28 bp, Artificial Sequence
  MfeILCbla-F1
gtgagcggataacaattgaattaaggag

SEQ ID NO: 292 - DNA, 87 bp, Artificial Sequence
  DXLC**bla-R1
cagaaccaccaccgctgccaccaccgcattcaccacggttgaaagatttggtaaccggagagctcagttattagtgggtaacttcgc

SEQ ID NO: 293 - DNA, 87 bp, Artificial Sequence
  DXLCbla-R1
cagaaccaccaccgctgccaccaccgcattcaccacggttgaaagatttggtaaccggagagctcagaccctggtgggtaacttcgc

SEQ ID NO: 294 - DNA, 66 bp, Artificial Sequence
  LCbla-F2
ggtggtggcagcggtggtggttctggtggcggtagcggcggtggctctcacccagaaacgctggtg

SEQ ID NO: 295 - DNA, 45 bp, Artificial Sequence
  PacILCbla-R2
cgccgccgttaattaattattaccaatgcttaatcagtgaggcac

SEQ ID NO: 296 - DNA, 25 bp, Artificial Sequence
  2G12VH-F
gtagcctaggcggccgcagaagttc

SEQ ID NO: 297 - DNA, 44 bp, Artificial Sequence
  DXHC**bla-R1
gacggacctttggtcgacgcttattaaacggtaacaacggtacc

SEQ ID NO: 298 - DNA, 44 bp, Artificial Sequence
  DXHC**bla-F2
ggtaccgttgttaccgtttaataagcgtcgaccaaaggtccgtc

SEQ ID NO: 299 - DNA, 52 bp, Artificial Sequence
  DXHCbla-R2
cagaaccaccaccgctgccaccaccgcaagatttcggttcaactttcttgtc

SEQ ID NO: 300 - DNA, 50 bp, Artificial Sequence
  DXHisHAHCbla-R2
cagaaccaccaccgctgccaccaccagaagcgtagtccggaacgtcgtac

SEQ ID NO: 301 - DNA, 40 bp, Artificial Sequence
  HCbla-R3
cgccgccggctagcttaccaatgcttaatcagtgaggcac

SEQ ID NO: 302 - DNA, 28 bp, Artificial Sequence
  MfeILCbla-F1
gtgagcggataacaattgaattaaggag

SEQ ID NO: 303 - DNA, 79 bp, Artificial Sequence
  DXLCSacIPacI-R1
cctccttattaattaattagcattcaccacggttgaaagatttggtaaccggagagctcagaccctggtgggtaacttc

SEQ ID NO: 304 - DNA, 21 bp, Artificial Sequence
  Seq2G12CK-F
ctgaccctgtctaaagctgac

SEQ ID NO: 305 - DNA, 21 bp, Artificial Sequence
  SeqpCALMfeI-F
gttagctcactcattaggcac

SEQ ID NO: 306 - DNA, 20 bp, Artificial Sequence
  SeqpCALOmpA-R
ctaggctacggtagcgaaac

SEQ ID NO: 307 - DNA, 20 bp, Artificial Sequence
  Seq2G12CH-F
ccagacctacatctgcaacg

SEQ ID NO: 308 - DNA, 20 bp, Artificial Sequence
  SeqpCALNheI-R
caagtgtagcggtcacgctg

SEQ ID NO: 309 - DNA, 20 bp, Artificial Sequence
  SeqpCALOmpA-F
gatataattatgaaaaagac

SEQ ID NO: 310 - DNA, 20 bp, Artificial Sequence
  SeqpCALDraIII-F
ccccgtcaagctctaaatcg

SEQ ID NO: 311 - DNA, 20 bp, Artificial Sequence
  SeqpCALPciI-R
gcttcctcgctcactgactc

SEQ ID NO: 312 - DNA, 21 bp, Artificial Sequence
  SeqCmR-F
gaccgttcagctggatattac

SEQ ID NO: 313 - DNA, 21 bp, Artificial Sequence
  SeqCmR-R
ggtgctacagagttcttgaag

SEQ ID NO: 314 - DNA, 34 bp, Artificial Sequence
  2G12Asp-R
ctgggtcataacaacatcggccatggccggctag

SEQ ID NO: 315 - DNA, 39 bp, Artificial Sequence
  2G12DIQ-R
ggagactgggtcatctggatatcggccatggccggctag

SEQ ID NO: 316 - DNA, 34 bp, Artificial Sequence
  2G12Asp-F
ctagccggccatggccgatgttgttatgacccag

SEQ ID NO: 317 - DNA, 39 bp, Artificial Sequence
  2G12DIQ-F
ctagccggccatggccgatatccagatgacccagtctcc

SEQ ID NO: 318 - DNA, 28 bp, Artificial Sequence
  2G12CKSacI-R
cggttgaaagatttggtaaccggagagc

SEQ ID NO: 319 - protein, 4 aa, Artificial Sequence
  5' plasmid sequence
AGVV

SEQ ID NO: 320 - protein, 16 aa, Artificial Sequence
  Linker
GGGSGGGSGGGSGGGS

SEQ ID NO: 321 - DNA, 5978 bp, Artificial Sequence
  2G12 LC bla pCAL IT* CmR (2G12 LC bla)
gtggcacttttcggggaaatgtgcgcggaacccctatttgtttatttttctaaatacattcaaatatgtatccgctcatgagacaataaccctgataaatgcttcaataatattgaaaaaggaagagtatggagaaaaaaatcactggatataccaccgttgatatatcccaatggcatcgtaaagaacattttgaggcatttcagtcagttgctcaatgtacctataaccagaccgttcagctggatattacggcctttttaaagaccgtaaagaaaaataagcacaagttttatccggcctttattcacattcttgcccgcctgatgaatgctcatccggaattccgtatggcaatgaaagacggtgagctggtgatatgggatagtgttcacccttgttacaccgttttccatgagcaaactgaaacgttttcatcgctctggagtgaataccacgacgatttccggcagtttctacacatatattcgcaagatgtggcgtgttacggtgaaaacctggcctatttccctaaagggtttattgagaatatgtttttcgtctcagccaatccctgggtgagtttcaccagttttgatttaaacgtggccaatatggacaacttcttcgcccccgttttcaccatgggcaaatattatacgcaaggcgacaaggtgctgatgccgctggcgattcaggttcatcatgccgtttgtgatggcttccatgtcggcagaatgcttaatgaattacaacagtactgcgatgagtggcagggcggggcgtaactgtcagaccaagtttactcatatatactttagattgatttaaaacttcatttttaatttaaaaggatctaggtgaagatcctttttgataatctcatgaccaaaatcccttaacgtgagttttcgttccactgagcgtcagaccccgtagaaaagatcaaaggatcttcttgagatcctttttttctgcgcgtaatctgctgcttgcaaacaaaaaaaccaccgctaccagcggtggtttgtttgccggatcaagagctaccaactctttttccgaaggtaactggcttcagcagagcgcagataccaaatactgtccttctagtgtagccgtagttaggccaccacttcaagaactctgtagcaccgcctacatacctcgctctgctaatcctgttaccagtggctgctgccagtggcgataagtcgtgtcttaccgggttggactcaagacgatagttaccggataaggcgcagcggtcgggctgaacggggggttcgtgcacacagcccagcttggagcgaacgacctacaccgaactgagatacctacagcgtgagctatgagaaagcgccacgcttcccgaagggagaaaggcggacaggtatccggtaagcggcagggtcggaacaggagagcgcacgagggagcttccagggggaaacgcctggtatctttatagtcctgtcgggtttcgccacctctgacttgagcgtcgatttttgtgatgctcgtcaggggggcggagcctatggaaaaacgccagcaacgcggcctttttacggttcctggccttttgctggccttttgctcacatgttctttcctgcgttatcccctgattctgtggataaccgtattaccgcctttgagtgagctgataccgctcgccgcagccgaacgaccgagcgcagcgagtcagtgagcgaggaagcgacaccatcgaatggcgcaaaacctttcgcggtatggcatgatagcgcccggaagagagtcaattcagggtggtgaatgtgaaaccagtaacgttatacgatgtcgcagagtatgccggtgtctcttatcagaccgtttcccgcgtggtgaaccaggccagccacgtttctgcgaaaacgcgggaaaaagtggaagcggcgatggcggagctgaattacattcccaaccgcgtggcacaacaactggcgggcaaacagtcgttgctgattggcgttgccacctccagtctggccctgcacgcgccgtcgcaaattgtcgcggcgattaaatctcgcgccgatcaactgggtgccagcgtggtggtgtcgatggtagaacgaagcggcgtcgaagcctgtaaagcggcggtgcacaatcttctcgcgcaacgcgtcagtgggctgatcattaactatccgctggatgaccaggatgccattgctgtggaagctgcctgcactaatgttccggcgttatttcttgatgtctctgaccagacacccatcaacagtattattttctcccatgaagacggtacgcgactgggcgtggagcatctggtcgcattgggtcaccagcaaatcgcgctgttagcgggcccattaagttctgtctcggcgcgtctgcgtctggctggctggcataaatatctcactcgcaatcaaattcagccgatagcggaacgggaaggcgactggagtgccatgtccggttttcaacaaaccatgcaaatgctgaatgagggcatcgttcccactgcgatgctggttgccaacgatcagatggcgctgggcgcaatgcgcgccattaccgagtccgggctgcgcgttggtgcggatatctcggtagtgggatacgacgataccgaagacagctcatgttatatcccgccgttaaccaccatcaaacaggattttcgcctgctggggcaaaccagcgtggaccgcttgctgcaactctctcagggccaggcggtgaagggcaatcagctgttgcccgtctcactggtgaaaagaaaaaccaccctggcgcccaatacgcaaaccgcctctccccgcgcgttggccgattcattaatgcagctggcacgacaggtttcccgactggaaagcgggcagtgagcggtacccgataaaagcggcttcctgacaggaggccgttttgttttgcagcccacctcaacgcaattaatgtgagttagctcactcattaggcaccccaggctttacactttatgcttccggctcgtatgttgtgtggaattgtgagcggataacaattgaattaaggaggatataattatgaaatacctgctgccgaccgcagccgctggtctgctgctgctcgcggcctagccggccatggccgccggtgttgttatgacccagtctccgtctaccctgtctgcttctgttggtgacaccatcaccatcacctgccgtgcttctcagtctatcgaaacctggctggcttggtaccagcagaaaccgggtaaagctccgaaactgctgatctacaaggcttctaccctgaaaaccggtgttccgtctcgtttctctggttctggttctggtaccgagttcaccctgaccatctctggtctgcagttcgacgacttcgctacctaccactgccagcactacgctggttactctgctaccttcggtcagggtacccgtgttgaaatcaaacgtaccgttgctgctccgtctgttttcatcttcccgccgtctgacgaacagctgaaatctggtaccgcttctgttgtttgcctgctgaacaacttctacccgcgtgaagctaaagttcagtggaaagttgacaacgctctgcagtctggtaactctcaggaatctgttaccgaacaggactctaaagactctacctactctctgtcttctaccctgaccctgtctaaagctgactacgaaaagcacaaagtttacgcttgcgaagttacccaccagggtctgagctctccggttaccaaatctttcaaccgtggtgaatgcggtggtggcagcggtggtggttctggtggcggtagcggcggtggctctcacccagaaacgctggtgaaagtaaaagatgctgaagatcagttgggtgcacgagtgggttacatcgaactggatctcaacagcggtaagatccttgagagttttcgccccgaagaacgttttccaatgatgagcacttttaaagttctgctatgtggcgcggtattatcccgtattgacgccgggcaagagcaactcggtcgccgcatacactattctcagaatgacttggttgagtactcaccagtcacagaaaagcatcttacggatggcatgacagtaagagaattatgcagtgctgccataaccatgagtgataacactgcggccaacttacttctgacaacgatcggaggaccgaaggagctaaccgcttttttgcacaacatgggggatcatgtaactcgccttgatcgttgggaaccggagctgaatgaagccataccaaacgacgagcgtgacaccacgatgcctgtagcaatggcaacaacgttgcgcaaactattaactggcgaactacttactctagcttcccggcaacaattaatagactggatggaggcggataaagttgcaggaccacttctgcgctcggcccttccggctggctggtttattgctgataaatctggagccggtgagcgtgggtctcgcggtatcattgcagcactggggccagatggtaagccctcccgtatcgtagttatctacacgacggggagtcaggcaactatggatgaacgaaatagacagatcgctgagataggtgcctcactgattaagcattggtaataattaattaataaggaggatataattatgaaaaagacagctatcgcgattgcagtggcactggctggtttcgctaccgtagcctaggcggccgcagaagttcagctggttgaatctggtggtggtctggttaaagctggtggttctctgatcctgtcttgcggtgtttctaacttccgtatctctgctcacaccatgaactgggttcgtcgtgttccgggtggtggtctggaatgggttgcttctatctctacctcttctacctaccgtgactacgctgacgctgttaaaggtcgtttcaccgtttctcgtgacgacctggaagacttcgtttacctgcagatgcataaaatgcgtgttgaagacaccgctatctactactgcgctcgtaaaggttctgaccgtctgtctgacaacgacccgttcgacgcttggggtccgggtaccgttgttaccgtttctccggcgtcgaccaaaggtccgtctgttttcccgctggctccgtcttctaaatctacctctggtggtaccgctgctctgggttgcctggttaaagactacttcccggaaccggttaccgtttcttggaactctggtgctctgacctctggtgttcacaccttcccggctgttctgcagtcttctggtctgtactctctgtcttctgttgttaccgttccgtcttcttctctgggtacccagacctacatctgcaacgttaaccacaaaccgtctaacaccaaagttgacaagaaagttgaaccgaaatcttgcctgcgatcgcggccaggccggccgcaccatcaccatcaccatggcgcatacccgtacgacgttccggactacgcttctactagctaacgatcgcccttcccaacagttgcgcagcctgaatggcgaatgggacgcgccctgtagcggcgcattaagcgcggcgggtgtggtggttacgcgcagcgtgaccgctacacttgccagcgccctagcgcccgctcctttcgctttcttcccttcctttctcgccacgttcgccggctttccccgtcaagctctaaatcgggggctccctttagggttccgatttagtgctttacggcacctcgaccccaaaaaacttgattagggtgatggttcacgtagtgggccatcgccctgatagacggtttttcgccctttgacgttggagtccacgttctttaatagtggactcttgttccaaactggaacaacactcaaccctatctcggtctattcttttgatttataagggattttgccgatttcggcctattggttaaaaaatgagctgatttaacaaaaatttaacgcgaattttaacaaaatattaacgcttacaatttag

SEQ ID NO: 322 - DNA, 5975 bp, Artificial Sequence
  2G12 DVV LC bla pCAL IT* CmR (2G12 DVV LC bla)
gtggcacttttcggggaaatgtgcgcggaacccctatttgtttatttttctaaatacattcaaatatgtatccgctcatgagacaataaccctgataaatgcttcaataatattgaaaaaggaagagtatggagaaaaaaatcactggatataccaccgttgatatatcccaatggcatcgtaaagaacattttgaggcatttcagtcagttgctcaatgtacctataaccagaccgttcagctggatattacggcctttttaaagaccgtaaagaaaaataagcacaagttttatccggcctttattcacattcttgcccgcctgatgaatgctcatccggaattccgtatggcaatgaaagacggtgagctggtgatatgggatagtgttcacccttgttacaccgttttccatgagcaaactgaaacgttttcatcgctctggagtgaataccacgacgatttccggcagtttctacacatatattcgcaagatgtggcgtgttacggtgaaaacctggcctatttccctaaagggtttattgagaatatgtttttcgtctcagccaatccctgggtgagtttcaccagttttgatttaaacgtggccaatatggacaacttcttcgcccccgttttcaccatgggcaaatattatacgcaaggcgacaaggtgctgatgccgctggcgattcaggttcatcatgccgtttgtgatggcttccatgtcggcagaatgcttaatgaattacaacagtactgcgatgagtggcagggcggggcgtaactgtcagaccaagtttactcatatatactttagattgatttaaaacttcatttttaatttaaaaggatctaggtgaagatcctttttgataatctcatgaccaaaatcccttaacgtgagttttcgttccactgagcgtcagaccccgtagaaaagatcaaaggatcttcttgagatcctttttttctgcgcgtaatctgctgcttgcaaacaaaaaaaccaccgctaccagcggtggtttgtttgccggatcaagagctaccaactctttttccgaaggtaactggcttcagcagagcgcagataccaaatactgtccttctagtgtagccgtagttaggccaccacttcaagaactctgtagcaccgcctacatacctcgctctgctaatcctgttaccagtggctgctgccagtggcgataagtcgtgtcttaccgggttggactcaagacgatagttaccggataaggcgcagcggtcgggctgaacggggggttcgtgcacacagcccagcttggagcgaacgacctacaccgaactgagatacctacagcgtgagctatgagaaagcgccacgcttcccgaagggagaaaggcggacaggtatccggtaagcggcagggtcggaacaggagagcgcacgagggagcttccagggggaaacgcctggtatctttatagtcctgtcgggtttcgccacctctgacttgagcgtcgatttttgtgatgctcgtcaggggggcggagcctatggaaaaacgccagcaacgcggcctttttacggttcctggccttttgctggccttttgctcacatgttctttcctgcgttatcccctgattctgtggataaccgtattaccgcctttgagtgagctgataccgctcgccgcagccgaacgaccgagcgcagcgagtcagtgagcgaggaagcgacaccatcgaatggcgcaaaacctttcgcggtatggcatgatagcgcccggaagagagtcaattcagggtggtgaatgtgaaaccagtaacgttatacgatgtcgcagagtatgccggtgtctcttatcagaccgtttcccgcgtggtgaaccaggccagccacgtttctgcgaaaacgcgggaaaaagtggaagcggcgatggcggagctgaattacattcccaaccgcgtggcacaacaactggcgggcaaacagtcgttgctgattggcgttgccacctccagtctggccctgcacgcgccgtcgcaaattgtcgcggcgattaaatctcgcgccgatcaactgggtgccagcgtggtggtgtcgatggtagaacgaagcggcgtcgaagcctgtaaagcggcggtgcacaatcttctcgcgcaacgcgtcagtgggctgatcattaactatccgctggatgaccaggatgccattgctgtggaagctgcctgcactaatgttccggcgttatttcttgatgtctctgaccagacacccatcaacagtattattttctcccatgaagacggtacgcgactgggcgtggagcatctggtcgcattgggtcaccagcaaatcgcgctgttagcgggcccattaagttctgtctcggcgcgtctgcgtctggctggctggcataaatatctcactcgcaatcaaattcagccgatagcggaacgggaaggcgactggagtgccatgtccggttttcaacaaaccatgcaaatgctgaatgagggcatcgttcccactgcgatgctggttgccaacgatcagatggcgctgggcgcaatgcgcgccattaccgagtccgggctgcgcgttggtgcggatatctcggtagtgggatacgacgataccgaagacagctcatgttatatcccgccgttaaccaccatcaaacaggattttcgcctgctggggcaaaccagcgtggaccgcttgctgcaactctctcagggccaggcggtgaagggcaatcagctgttgcccgtctcactggtgaaaagaaaaaccaccctggcgcccaatacgcaaaccgcctctccccgcgcgttggccgattcattaatgcagctggcacgacaggtttcccgactggaaagcgggcagtgagcggtacccgataaaagcggcttcctgacaggaggccgttttgttttgcagcccacctcaacgcaattaatgtgagttagctcactcattaggcaccccaggctttacactttatgcttccggctcgtatgttgtgtggaattgtgagcggataacaattgaattaaggaggatataattatgaaatacctgctgccgaccgcagccgctggtctgctgctgctcgcggcctagccggccatggccgatgttgttatgacccagtctccgtctaccctgtctgcttctgttggtgacaccatcaccatcacctgccgtgcttctcagtctatcgaaacctggctggcttggtaccagcagaaaccgggtaaagctccgaaactgctgatctacaaggcttctaccctgaaaaccggtgttccgtctcgtttctctggttctggttctggtaccgagttcaccctgaccatctctggtctgcagttcgacgacttcgctacctaccactgccagcactacgctggttactctgctaccttcggtcagggtacccgtgttgaaatcaaacgtaccgttgctgctccgtctgttttcatcttcccgccgtctgacgaacagctgaaatctggtaccgcttctgttgtttgcctgctgaacaacttctacccgcgtgaagctaaagttcagtggaaagttgacaacgctctgcagtctggtaactctcaggaatctgttaccgaacaggactctaaagactctacctactctctgtcttctaccctgaccctgtctaaagctgactacgaaaagcacaaagtttacgcttgcgaagttacccaccagggtctgagctctccggttaccaaatctttcaaccgtggtgaatgcggtggtggcagcggtggtggttctggtggcggtagcggcggtggctctcacccagaaacgctggtgaaagtaaaagatgctgaagatcagttgggtgcacgagtgggttacatcgaactggatctcaacagcggtaagatccttgagagttttcgccccgaagaacgttttccaatgatgagcacttttaaagttctgctatgtggcgcggtattatcccgtattgacgccgggcaagagcaactcggtcgccgcatacactattctcagaatgacttggttgagtactcaccagtcacagaaaagcatcttacggatggcatgacagtaagagaattatgcagtgctgccataaccatgagtgataacactgcggccaacttacttctgacaacgatcggaggaccgaaggagctaaccgcttttttgcacaacatgggggatcatgtaactcgccttgatcgttgggaaccggagctgaatgaagccataccaaacgacgagcgtgacaccacgatgcctgtagcaatggcaacaacgttgcgcaaactattaactggcgaactacttactctagcttcccggcaacaattaatagactggatggaggcggataaagttgcaggaccacttctgcgctcggcccttccggctggctggtttattgctgataaatctggagccggtgagcgtgggtctcgcggtatcattgcagcactggggccagatggtaagccctcccgtatcgtagttatctacacgacggggagtcaggcaactatggatgaacgaaatagacagatcgctgagataggtgcctcactgattaagcattggtaataattaattaataaggaggatataattatgaaaaagacagctatcgcgattgcagtggcactggctggtttcgctaccgtagcctaggcggccgcagaagttcagctggttgaatctggtggtggtctggttaaagctggtggttctctgatcctgtcttgcggtgtttctaacttccgtatctctgctcacaccatgaactgggttcgtcgtgttccgggtggtggtctggaatgggttgcttctatctctacctcttctacctaccgtgactacgctgacgctgttaaaggtcgtttcaccgtttctcgtgacgacctggaagacttcgtttacctgcagatgcataaaatgcgtgttgaagacaccgctatctactactgcgctcgtaaaggttctgaccgtctgtctgacaacgacccgttcgacgcttggggtccgggtaccgttgttaccgtttctccggcgtcgaccaaaggtccgtctgttttcccgctggctccgtcttctaaatctacctctggtggtaccgctgctctgggttgcctggttaaagactacttcccggaaccggttaccgtttcttggaactctggtgctctgacctctggtgttcacaccttcccggctgttctgcagtcttctggtctgtactctctgtcttctgttgttaccgttccgtcttcttctctgggtacccagacctacatctgcaacgttaaccacaaaccgtctaacaccaaagttgacaagaaagttgaaccgaaatcttgcctgcgatcgcggccaggccggccgcaccatcaccatcaccatggcgcatacccgtacgacgttccggactacgcttctactagctaacgatcgcccttcccaacagttgcgcagcctgaatggcgaatgggacgcgccctgtagcggcgcattaagcgcggcgggtgtggtggttacgcgcagcgtgaccgctacacttgccagcgccctagcgcccgctcctttcgctttcttcccttcctttctcgccacgttcgccggctttccccgtcaagctctaaatcgggggctccctttagggttccgatttagtgctttacggcacctcgaccccaaaaaacttgattagggtgatggttcacgtagtgggccatcgccctgatagacggtttttcgccctttgacgttggagtccacgttctttaatagtggactcttgttccaaactggaacaacactcaaccctatctcggtctattcttttgatttataagggattttgccgatttcggcctattggttaaaaaatgagctgatttaacaaaaatttaacgcgaattttaacaaaatattaacgcttacaatttag

SEQ ID NO: 323 - DNA, 5975 bp, Artificial Sequence
  2G12 DIQ LC bla pCAL IT* CmR (2G12 DIQ LC bla)
gtggcacttttcggggaaatgtgcgcggaacccctatttgtttatttttctaaatacattcaaatatgtatccgctcatgagacaataaccctgataaatgcttcaataatattgaaaaaggaagagtatggagaaaaaaatcactggatataccaccgttgatatatcccaatggcatcgtaaagaacattttgaggcatttcagtcagttgctcaatgtacctataaccagaccgttcagctggatattacggcctttttaaagaccgtaaagaaaaataagcacaagttttatccggcctttattcacattcttgcccgcctgatgaatgctcatccggaattccgtatggcaatgaaagacggtgagctggtgatatgggatagtgttcacccttgttacaccgttttccatgagcaaactgaaacgttttcatcgctctggagtgaataccacgacgatttccggcagtttctacacatatattcgcaagatgtggcgtgttacggtgaaaacctggcctatttccctaaagggtttattgagaatatgtttttcgtctcagccaatccctgggtgagtttcaccagttttgatttaaacgtggccaatatggacaacttcttcgcccccgttttcaccatgggcaaatattatacgcaaggcgacaaggtgctgatgccgctggcgattcaggttcatcatgccgtttgtgatggcttccatgtcggcagaatgcttaatgaattacaacagtactgcgatgagtggcagggcggggcgtaactgtcagaccaagtttactcatatatactttagattgatttaaaacttcatttttaatttaaaaggatctaggtgaagatcctttttgataatctcatgaccaaaatcccttaacgtgagttttcgttccactgagcgtcagaccccgtagaaaagatcaaaggatcttcttgagatcctttttttctgcgcgtaatctgctgcttgcaaacaaaaaaaccaccgctaccagcggtggtttgtttgccggatcaagagctaccaactctttttccgaaggtaactggcttcagcagagcgcagataccaaatactgtccttctagtgtagccgtagttaggccaccacttcaagaactctgtagcaccgcctacatacctcgctctgctaatcctgttaccagtggctgctgccagtggcgataagtcgtgtcttaccgggttggactcaagacgatagttaccggataaggcgcagcggtcgggctgaacggggggttcgtgcacacagcccagcttggagcgaacgacctacaccgaactgagatacctacagcgtgagctatgagaaagcgccacgcttcccgaagggagaaaggcggacaggtatccggtaagcggcagggtcggaacaggagagcgcacgagggagcttccagggggaaacgcctggtatctttatagtcctgtcgggtttcgccacctctgacttgagcgtcgatttttgtgatgctcgtcaggggggcggagcctatggaaaaacgccagcaacgcggcctttttacggttcctggccttttgctggccttttgctcacatgttctttcctgcgttatcccctgattctgtggataaccgtattaccgcctttgagtgagctgataccgctcgccgcagccgaacgaccgagcgcagcgagtcagtgagcgaggaagcgacaccatcgaatggcgcaaaacctttcgcggtatggcatgatagcgcccggaagagagtcaattcagggtggtgaatgtgaaaccagtaacgttatacgatgtcgcagagtatgccggtgtctcttatcagaccgtttcccgcgtggtgaaccaggccagccacgtttctgcgaaaacgcgggaaaaagtggaagcggcgatggcggagctgaattacattcccaaccgcgtggcacaacaactggcgggcaaacagtcgttgctgattggcgttgccacctccagtctggccctgcacgcgccgtcgcaaattgtcgcggcgattaaatctcgcgccgatcaactgggtgccagcgtggtggtgtcgatggtagaacgaagcggcgtcgaagcctgtaaagcggcggtgcacaatcttctcgcgcaacgcgtcagtgggctgatcattaactatccgctggatgaccaggatgccattgctgtggaagctgcctgcactaatgttccggcgttatttcttgatgtctctgaccagacacccatcaacagtattattttctcccatgaagacggtacgcgactgggcgtggagcatctggtcgcattgggtcaccagcaaatcgcgctgttagcgggcccattaagttctgtctcggcgcgtctgcgtctggctggctggcataaatatctcactcgcaatcaaattcagccgatagcggaacgggaaggcgactggagtgccatgtccggttttcaacaaaccatgcaaatgctgaatgagggcatcgttcccactgcgatgctggttgccaacgatcagatggcgctgggcgcaatgcgcgccattaccgagtccgggctgcgcgttggtgcggatatctcggtagtgggatacgacgataccgaagacagctcatgttatatcccgccgttaaccaccatcaaacaggattttcgcctgctggggcaaaccagcgtggaccgcttgctgcaactctctcagggccaggcggtgaagggcaatcagctgttgcccgtctcactggtgaaaagaaaaaccaccctggcgcccaatacgcaaaccgcctctccccgcgcgttggccgattcattaatgcagctggcacgacaggtttcccgactggaaagcgggcagtgagcggtacccgataaaagcggcttcctgacaggaggccgttttgttttgcagcccacctcaacgcaattaatgtgagttagctcactcattaggcaccccaggctttacactttatgcttccggctcgtatgttgtgtggaattgtgagcggataacaattgaattaaggaggatataattatgaaatacctgctgccgaccgcagccgctggtctgctgctgctcgcggcctagccggccatggccgatatccagatgacccagtctccgtctaccctgtctgcttctgttggtgacaccatcaccatcacctgccgtgcttctcagtctatcgaaacctggctggcttggtaccagcagaaaccgggtaaagctccgaaactgctgatctacaaggcttctaccctgaaaaccggtgttccgtctcgtttctctggttctggttctggtaccgagttcaccctgaccatctctggtctgcagttcgacgacttcgctacctaccactgccagcactacgctggttactctgctaccttcggtcagggtacccgtgttgaaatcaaacgtaccgttgctgctccgtctgttttcatcttcccgccgtctgacgaacagctgaaatctggtaccgcttctgttgtttgcctgctgaacaacttctacccgcgtgaagctaaagttcagtggaaagttgacaacgctctgcagtctggtaactctcaggaatctgttaccgaacaggactctaaagactctacctactctctgtcttctaccctgaccctgtctaaagctgactacgaaaagcacaaagtttacgcttgcgaagttacccaccagggtctgagctctccggttaccaaatctttcaaccgtggtgaatgcggtggtggcagcggtggtggttctggtggcggtagcggcggtggctctcacccagaaacgctggtgaaagtaaaagatgctgaagatcagttgggtgcacgagtgggttacatcgaactggatctcaacagcggtaagatccttgagagttttcgccccgaagaacgttttccaatgatgagcacttttaaagttctgctatgtggcgcggtattatcccgtattgacgccgggcaagagcaactcggtcgccgcatacactattctcagaatgacttggttgagtactcaccagtcacagaaaagcatcttacggatggcatgacagtaagagaattatgcagtgctgccataaccatgagtgataacactgcggccaacttacttctgacaacgatcggaggaccgaaggagctaaccgcttttttgcacaacatgggggatcatgtaactcgccttgatcgttgggaaccggagctgaatgaagccataccaaacgacgagcgtgacaccacgatgcctgtagcaatggcaacaacgttgcgcaaactattaactggcgaactacttactctagcttcccggcaacaattaatagactggatggaggcggataaagttgcaggaccacttctgcgctcggcccttccggctggctggtttattgctgataaatctggagccggtgagcgtgggtctcgcggtatcattgcagcactggggccagatggtaagccctcccgtatcgtagttatctacacgacggggagtcaggcaactatggatgaacgaaatagacagatcgctgagataggtgcctcactgattaagcattggtaataattaattaataaggaggatataattatgaaaaagacagctatcgcgattgcagtggcactggctggtttcgctaccgtagcctaggcggccgcagaagttcagctggttgaatctggtggtggtctggttaaagctggtggttctctgatcctgtcttgcggtgtttctaacttccgtatctctgctcacaccatgaactgggttcgtcgtgttccgggtggtggtctggaatgggttgcttctatctctacctcttctacctaccgtgactacgctgacgctgttaaaggtcgtttcaccgtttctcgtgacgacctggaagacttcgtttacctgcagatgcataaaatgcgtgttgaagacaccgctatctactactgcgctcgtaaaggttctgaccgtctgtctgacaacgacccgttcgacgcttggggtccgggtaccgttgttaccgtttctccggcgtcgaccaaaggtccgtctgttttcccgctggctccgtcttctaaatctacctctggtggtaccgctgctctgggttgcctggttaaagactacttcccggaaccggttaccgtttcttggaactctggtgctctgacctctggtgttcacaccttcccggctgttctgcagtcttctggtctgtactctctgtcttctgttgttaccgttccgtcttcttctctgggtacccagacctacatctgcaacgttaaccacaaaccgtctaacaccaaagttgacaagaaagttgaaccgaaatcttgcctgcgatcgcggccaggccggccgcaccatcaccatcaccatggcgcatacccgtacgacgttccggactacgcttctactagctaacgatcgcccttcccaacagttgcgcagcctgaatggcgaatgggacgcgccctgtagcggcgcattaagcgcggcgggtgtggtggttacgcgcagcgtgaccgctacacttgccagcgccctagcgcccgctcctttcgctttcttcccttcctttctcgccacgttcgccggctttccccgtcaagctctaaatcgggggctccctttagggttccgatttagtgctttacggcacctcgaccccaaaaaacttgattagggtgatggttcacgtagtgggccatcgccctgatagacggtttttcgccctttgacgttggagtccacgttctttaatagtggactcttgttccaaactggaacaacactcaaccctatctcggtctattcttttgatttataagggattttgccgatttcggcctattggttaaaaaatgagctgatttaacaaaaatttaacgcgaattttaacaaaatattaacgcttacaatttag

SEQ ID NO: 324 - DNA, 5978 bp, Artificial Sequence
  2G12 HC bla pCAL IT* CmR (2G12 HC bla)
gtggcacttttcggggaaatgtgcgcggaacccctatttgtttatttttctaaatacattcaaatatgtatccgctcatgagacaataaccctgataaatgcttcaataatattgaaaaaggaagagtatggagaaaaaaatcactggatataccaccgttgatatatcccaatggcatcgtaaagaacattttgaggcatttcagtcagttgctcaatgtacctataaccagaccgttcagctggatattacggcctttttaaagaccgtaaagaaaaataagcacaagttttatccggcctttattcacattcttgcccgcctgatgaatgctcatccggaattccgtatggcaatgaaagacggtgagctggtgatatgggatagtgttcacccttgttacaccgttttccatgagcaaactgaaacgttttcatcgctctggagtgaataccacgacgatttccggcagtttctacacatatattcgcaagatgtggcgtgttacggtgaaaacctggcctatttccctaaagggtttattgagaatatgtttttcgtctcagccaatccctgggtgagtttcaccagttttgatttaaacgtggccaatatggacaacttcttcgcccccgttttcaccatgggcaaatattatacgcaaggcgacaaggtgctgatgccgctggcgattcaggttcatcatgccgtttgtgatggcttccatgtcggcagaatgcttaatgaattacaacagtactgcgatgagtggcagggcggggcgtaactgtcagaccaagtttactcatatatactttagattgatttaaaacttcatttttaatttaaaaggatctaggtgaagatcctttttgataatctcatgaccaaaatcccttaacgtgagttttcgttccactgagcgtcagaccccgtagaaaagatcaaaggatcttcttgagatcctttttttctgcgcgtaatctgctgcttgcaaacaaaaaaaccaccgctaccagcggtggtttgtttgccggatcaagagctaccaactctttttccgaaggtaactggcttcagcagagcgcagataccaaatactgtccttctagtgtagccgtagttaggccaccacttcaagaactctgtagcaccgcctacatacctcgctctgctaatcctgttaccagtggctgctgccagtggcgataagtcgtgtcttaccgggttggactcaagacgatagttaccggataaggcgcagcggtcgggctgaacggggggttcgtgcacacagcccagcttggagcgaacgacctacaccgaactgagatacctacagcgtgagctatgagaaagcgccacgcttcccgaagggagaaaggcggacaggtatccggtaagcggcagggtcggaacaggagagcgcacgagggagcttccagggggaaacgcctggtatctttatagtcctgtcgggtttcgccacctctgacttgagcgtcgatttttgtgatgctcgtcaggggggcggagcctatggaaaaacgccagcaacgcggcctttttacggttcctggccttttgctggccttttgctcacatgttctttcctgcgttatcccctgattctgtggataaccgtattaccgcctttgagtgagctgataccgctcgccgcagccgaacgaccgagcgcagcgagtcagtgagcgaggaagcgacaccatcgaatggcgcaaaacctttcgcggtatggcatgatagcgcccggaagagagtcaattcagggtggtgaatgtgaaaccagtaacgttatacgatgtcgcagagtatgccggtgtctcttatcagaccgtttcccgcgtggtgaaccaggccagccacgtttctgcgaaaacgcgggaaaaagtggaagcggcgatggcggagctgaattacattcccaaccgcgtggcacaacaactggcgggcaaacagtcgttgctgattggcgttgccacctccagtctggccctgcacgcgccgtcgcaaattgtcgcggcgattaaatctcgcgccgatcaactgggtgccagcgtggtggtgtcgatggtagaacgaagcggcgtcgaagcctgtaaagcggcggtgcacaatcttctcgcgcaacgcgtcagtgggctgatcattaactatccgctggatgaccaggatgccattgctgtggaagctgcctgcactaatgttccggcgttatttcttgatgtctctgaccagacacccatcaacagtattattttctcccatgaagacggtacgcgactgggcgtggagcatctggtcgcattgggtcaccagcaaatcgcgctgttagcgggcccattaagttctgtctcggcgcgtctgcgtctggctggctggcataaatatctcactcgcaatcaaattcagccgatagcggaacgggaaggcgactggagtgccatgtccggttttcaacaaaccatgcaaatgctgaatgagggcatcgttcccactgcgatgctggttgccaacgatcagatggcgctgggcgcaatgcgcgccattaccgagtccgggctgcgcgttggtgcggatatctcggtagtgggatacgacgataccgaagacagctcatgttatatcccgccgttaaccaccatcaaacaggattttcgcctgctggggcaaaccagcgtggaccgcttgctgcaactctctcagggccaggcggtgaagggcaatcagctgttgcccgtctcactggtgaaaagaaaaaccaccctggcgcccaatacgcaaaccgcctctccccgcgcgttggccgattcattaatgcagctggcacgacaggtttcccgactggaaagcgggcagtgagcggtacccgataaaagcggcttcctgacaggaggccgttttgttttgcagcccacctcaacgcaattaatgtgagttagctcactcattaggcaccccaggctttacactttatgcttccggctcgtatgttgtgtggaattgtgagcggataacaattgaattaaggaggatataattatgaaatacctgctgccgaccgcagccgctggtctgctgctgctcgcggcctagccggccatggccgccggtgttgttatgacccagtctccgtctaccctgtctgcttctgttggtgacaccatcaccatcacctgccgtgcttctcagtctatcgaaacctggctggcttggtaccagcagaaaccgggtaaagctccgaaactgctgatctacaaggcttctaccctgaaaaccggtgttccgtctcgtttctctggttctggttctggtaccgagttcaccctgaccatctctggtctgcagttcgacgacttcgctacctaccactgccagcactacgctggttactctgctaccttcggtcagggtacccgtgttgaaatcaaacgtaccgttgctgctccgtctgttttcatcttcccgccgtctgacgaacagctgaaatctggtaccgcttctgttgtttgcctgctgaacaacttctacccgcgtgaagctaaagttcagtggaaagttgacaacgctctgcagtctggtaactctcaggaatctgttaccgaacaggactctaaagactctacctactctctgtcttctaccctgaccctgtctaaagctgactacgaaaagcacaaagtttacgcttgcgaagttacccaccagggtctgagctctccggttaccaaatctttcaaccgtggtgaatgctaattaattaataaggaggatataattatgaaaaagacagctatcgcgattgcagtggcactggctggtttcgctaccgtagcctaggcggccgcagaagttcagctggttgaatctggtggtggtctggttaaagctggtggttctctgatcctgtcttgcggtgtttctaacttccgtatctctgctcacaccatgaactgggttcgtcgtgttccgggtggtggtctggaatgggttgcttctatctctacctcttctacctaccgtgactacgctgacgctgttaaaggtcgtttcaccgtttctcgtgacgacctggaagacttcgtttacctgcagatgcataaaatgcgtgttgaagacaccgctatctactactgcgctcgtaaaggttctgaccgtctgtctgacaacgacccgttcgacgcttggggtccgggtaccgttgttaccgtttctccggcgtcgaccaaaggtccgtctgttttcccgctggctccgtcttctaaatctacctctggtggtaccgctgctctgggttgcctggttaaagactacttcccggaaccggttaccgtttcttggaactctggtgctctgacctctggtgttcacaccttcccggctgttctgcagtcttctggtctgtactctctgtcttctgttgttaccgttccgtcttcttctctgggtacccagacctacatctgcaacgttaaccacaaaccgtctaacaccaaagttgacaagaaagttgaaccgaaatcttgcctgcgatcgcggccaggccggccgcaccatcaccatcaccatggcgcatacccgtacgacgttccggactacgcttctggtggtggcagcggtggtggttctggtggcggtagcggcggtggctctcacccagaaacgctggtgaaagtaaaagatgctgaagatcagttgggtgcacgagtgggttacatcgaactggatctcaacagcggtaagatccttgagagttttcgccccgaagaacgttttccaatgatgagcacttttaaagttctgctatgtggcgcggtattatcccgtattgacgccgggcaagagcaactcggtcgccgcatacactattctcagaatgacttggttgagtactcaccagtcacagaaaagcatcttacggatggcatgacagtaagagaattatgcagtgctgccataaccatgagtgataacactgcggccaacttacttctgacaacgatcggaggaccgaaggagctaaccgcttttttgcacaacatgggggatcatgtaactcgccttgatcgttgggaaccggagctgaatgaagccataccaaacgacgagcgtgacaccacgatgcctgtagcaatggcaacaacgttgcgcaaactattaactggcgaactacttactctagcttcccggcaacaattaatagactggatggaggcggataaagttgcaggaccacttctgcgctcggcccttccggctggctggtttattgctgataaatctggagccggtgagcgtgggtctcgcggtatcattgcagcactggggccagatggtaagccctcccgtatcgtagttatctacacgacggggagtcaggcaactatggatgaacgaaatagacagatcgctgagataggtgcctcactgattaagcattggtaagctagctaacgatcgcccttcccaacagttgcgcagcctgaatggcgaatgggacgcgccctgtagcggcgcattaagcgcggcgggtgtggtggttacgcgcagcgtgaccgctacacttgccagcgccctagcgcccgctcctttcgctttcttcccttcctttctcgccacgttcgccggctttccccgtcaagctctaaatcgggggctccctttagggttccgatttagtgctttacggcacctcgaccccaaaaaacttgattagggtgatggttcacgtagtgggccatcgccctgatagacggtttttcgccctttgacgttggagtccacgttctttaatagtggactcttgttccaaactggaacaacactcaaccctatctcggtctattcttttgatttataagggattttgccgatttcggcctattggttaaaaaatgagctgatttaacaaaaatttaacgcgaattttaacaaaatattaacgcttacaatttag

SEQ ID NO: 325 - DNA, 5978 bp, Artificial Sequence
  2G12 LC** bla pCAL IT* CmR (2G12 LC**bla)
gtggcacttttcggggaaatgtgcgcggaacccctatttgtttatttttctaaatacattcaaatatgtatccgctcatgagacaataaccctgataaatgcttcaataatattgaaaaaggaagagtatggagaaaaaaatcactggatataccaccgttgatatatcccaatggcatcgtaaagaacattttgaggcatttcagtcagttgctcaatgtacctataaccagaccgttcagctggatattacggcctttttaaagaccgtaaagaaaaataagcacaagttttatccggcctttattcacattcttgcccgcctgatgaatgctcatccggaattccgtatggcaatgaaagacggtgagctggtgatatgggatagtgttcacccttgttacaccgttttccatgagcaaactgaaacgttttcatcgctctggagtgaataccacgacgatttccggcagtttctacacatatattcgcaagatgtggcgtgttacggtgaaaacctggcctatttccctaaagggtttattgagaatatgtttttcgtctcagccaatccctgggtgagtttcaccagttttgatttaaacgtggccaatatggacaacttcttcgcccccgttttcaccatgggcaaatattatacgcaaggcgacaaggtgctgatgccgctggcgattcaggttcatcatgccgtttgtgatggcttccatgtcggcagaatgcttaatgaattacaacagtactgcgatgagtggcagggcggggcgtaactgtcagaccaagtttactcatatatactttagattgatttaaaacttcatttttaatttaaaaggatctaggtgaagatcctttttgataatctcatgaccaaaatcccttaacgtgagttttcgttccactgagcgtcagaccccgtagaaaagatcaaaggatcttcttgagatcctttttttctgcgcgtaatctgctgcttgcaaacaaaaaaaccaccgctaccagcggtggtttgtttgccggatcaagagctaccaactctttttccgaaggtaactggcttcagcagagcgcagataccaaatactgtccttctagtgtagccgtagttaggccaccacttcaagaactctgtagcaccgcctacatacctcgctctgctaatcctgttaccagtggctgctgccagtggcgataagtcgtgtcttaccgggttggactcaagacgatagttaccggataaggcgcagcggtcgggctgaacggggggttcgtgcacacagcccagcttggagcgaacgacctacaccgaactgagatacctacagcgtgagctatgagaaagcgccacgcttcccgaagggagaaaggcggacaggtatccggtaagcggcagggtcggaacaggagagcgcacgagggagcttccagggggaaacgcctggtatctttatagtcctgtcgggtttcgccacctctgacttgagcgtcgatttttgtgatgctcgtcaggggggcggagcctatggaaaaacgccagcaacgcggcctttttacggttcctggccttttgctggccttttgctcacatgttctttcctgcgttatcccctgattctgtggataaccgtattaccgcctttgagtgagctgataccgctcgccgcagccgaacgaccgagcgcagcgagtcagtgagcgaggaagcgacaccatcgaatggcgcaaaacctttcgcggtatggcatgatagcgcccggaagagagtcaattcagggtggtgaatgtgaaaccagtaacgttatacgatgtcgcagagtatgccggtgtctcttatcagaccgtttcccgcgtggtgaaccaggccagccacgtttctgcgaaaacgcgggaaaaagtggaagcggcgatggcggagctgaattacattcccaaccgcgtggcacaacaactggcgggcaaacagtcgttgctgattggcgttgccacctccagtctggccctgcacgcgccgtcgcaaattgtcgcggcgattaaatctcgcgccgatcaactgggtgccagcgtggtggtgtcgatggtagaacgaagcggcgtcgaagcctgtaaagcggcggtgcacaatcttctcgcgcaacgcgtcagtgggctgatcattaactatccgctggatgaccaggatgccattgctgtggaagctgcctgcactaatgttccggcgttatttcttgatgtctctgaccagacacccatcaacagtattattttctcccatgaagacggtacgcgactgggcgtggagcatctggtcgcattgggtcaccagcaaatcgcgctgttagcgggcccattaagttctgtctcggcgcgtctgcgtctggctggctggcataaatatctcactcgcaatcaaattcagccgatagcggaacgggaaggcgactggagtgccatgtccggttttcaacaaaccatgcaaatgctgaatgagggcatcgttcccactgcgatgctggttgccaacgatcagatggcgctgggcgcaatgcgcgccattaccgagtccgggctgcgcgttggtgcggatatctcggtagtgggatacgacgataccgaagacagctcatgttatatcccgccgttaaccaccatcaaacaggattttcgcctgctggggcaaaccagcgtggaccgcttgctgcaactctctcagggccaggcggtgaagggcaatcagctgttgcccgtctcactggtgaaaagaaaaaccaccctggcgcccaatacgcaaaccgcctctccccgcgcgttggccgattcattaatgcagctggcacgacaggtttcccgactggaaagcgggcagtgagcggtacccgataaaagcggcttcctgacaggaggccgttttgttttgcagcccacctcaacgcaattaatgtgagttagctcactcattaggcaccccaggctttacactttatgcttccggctcgtatgttgtgtggaattgtgagcggataacaattgaattaaggaggatataattatgaaatacctgctgccgaccgcagccgctggtctgctgctgctcgcggcctagccggccatggccgccggtgttgttatgacccagtctccgtctaccctgtctgcttctgttggtgacaccatcaccatcacctgccgtgcttctcagtctatcgaaacctggctggcttggtaccagcagaaaccgggtaaagctccgaaactgctgatctacaaggcttctaccctgaaaaccggtgttccgtctcgtttctctggttctggttctggtaccgagttcaccctgaccatctctggtctgcagttcgacgacttcgctacctaccactgccagcactacgctggttactctgctaccttcggtcagggtacccgtgttgaaatcaaacgtaccgttgctgctccgtctgttttcatcttcccgccgtctgacgaacagctgaaatctggtaccgcttctgttgtttgcctgctgaacaacttctacccgcgtgaagctaaagttcagtggaaagttgacaacgctctgcagtctggtaactctcaggaatctgttaccgaacaggactctaaagactctacctactctctgtcttctaccctgaccctgtctaaagctgactacgaaaagcacaaagtttacgcttgcgaagttacccactaataactgagctctccggttaccaaatctttcaaccgtggtgaatgcggtggtggcagcggtggtggttctggtggcggtagcggcggtggctctcacccagaaacgctggtgaaagtaaaagatgctgaagatcagttgggtgcacgagtgggttacatcgaactggatctcaacagcggtaagatccttgagagttttcgccccgaagaacgttttccaatgatgagcacttttaaagttctgctatgtggcgcggtattatcccgtattgacgccgggcaagagcaactcggtcgccgcatacactattctcagaatgacttggttgagtactcaccagtcacagaaaagcatcttacggatggcatgacagtaagagaattatgcagtgctgccataaccatgagtgataacactgcggccaacttacttctgacaacgatcggaggaccgaaggagctaaccgcttttttgcacaacatgggggatcatgtaactcgccttgatcgttgggaaccggagctgaatgaagccataccaaacgacgagcgtgacaccacgatgcctgtagcaatggcaacaacgttgcgcaaactattaactggcgaactacttactctagcttcccggcaacaattaatagactggatggaggcggataaagttgcaggaccacttctgcgctcggcccttccggctggctggtttattgctgataaatctggagccggtgagcgtgggtctcgcggtatcattgcagcactggggccagatggtaagccctcccgtatcgtagttatctacacgacggggagtcaggcaactatggatgaacgaaatagacagatcgctgagataggtgcctcactgattaagcattggtaataattaattaataaggaggatataattatgaaaaagacagctatcgcgattgcagtggcactggctggtttcgctaccgtagcctaggcggccgcagaagttcagctggttgaatctggtggtggtctggttaaagctggtggttctctgatcctgtcttgcggtgtttctaacttccgtatctctgctcacaccatgaactgggttcgtcgtgttccgggtggtggtctggaatgggttgcttctatctctacctcttctacctaccgtgactacgctgacgctgttaaaggtcgtttcaccgtttctcgtgacgacctggaagacttcgtttacctgcagatgcataaaatgcgtgttgaagacaccgctatctactactgcgctcgtaaaggttctgaccgtctgtctgacaacgacccgttcgacgcttggggtccgggtaccgttgttaccgtttctccggcgtcgaccaaaggtccgtctgttttcccgctggctccgtcttctaaatctacctctggtggtaccgctgctctgggttgcctggttaaagactacttcccggaaccggttaccgtttcttggaactctggtgctctgacctctggtgttcacaccttcccggctgttctgcagtcttctggtctgtactctctgtcttctgttgttaccgttccgtcttcttctctgggtacccagacctacatctgcaacgttaaccacaaaccgtctaacaccaaagttgacaagaaagttgaaccgaaatcttgcctgcgatcgcggccaggccggccgcaccatcaccatcaccatggcgcatacccgtacgacgttccggactacgcttctactagctaacgatcgcccttcccaacagttgcgcagcctgaatggcgaatgggacgcgccctgtagcggcgcattaagcgcggcgggtgtggtggttacgcgcagcgtgaccgctacacttgccagcgccctagcgcccgctcctttcgctttcttcccttcctttctcgccacgttcgccggctttccccgtcaagctctaaatcgggggctccctttagggttccgatttagtgctttacggcacctcgaccccaaaaaacttgattagggtgatggttcacgtagtgggccatcgccctgatagacggtttttcgccctttgacgttggagtccacgttctttaatagtggactcttgttccaaactggaacaacactcaaccctatctcggtctattcttttgatttataagggattttgccgatttcggcctattggttaaaaaatgagctgatttaacaaaaatttaacgcgaattttaacaaaatattaacgcttacaatttag

SEQ ID NO: 326 - DNA, 5975 bp, Artificial Sequence
  2G12 DVV LC** bla pCAL IT* CmR (DX DVV LC** bla)
gtggcacttttcggggaaatgtgcgcggaacccctatttgtttatttttctaaatacattcaaatatgtatccgctcatgagacaataaccctgataaatgcttcaataatattgaaaaaggaagagtatggagaaaaaaatcactggatataccaccgttgatatatcccaatggcatcgtaaagaacattttgaggcatttcagtcagttgctcaatgtacctataaccagaccgttcagctggatattacggcctttttaaagaccgtaaagaaaaataagcacaagttttatccggcctttattcacattcttgcccgcctgatgaatgctcatccggaattccgtatggcaatgaaagacggtgagctggtgatatgggatagtgttcacccttgttacaccgttttccatgagcaaactgaaacgttttcatcgctctggagtgaataccacgacgatttccggcagtttctacacatatattcgcaagatgtggcgtgttacggtgaaaacctggcctatttccctaaagggtttattgagaatatgtttttcgtctcagccaatccctgggtgagtttcaccagttttgatttaaacgtggccaatatggacaacttcttcgcccccgttttcaccatgggcaaatattatacgcaaggcgacaaggtgctgatgccgctggcgattcaggttcatcatgccgtttgtgatggcttccatgtcggcagaatgcttaatgaattacaacagtactgcgatgagtggcagggcggggcgtaactgtcagaccaagtttactcatatatactttagattgatttaaaacttcatttttaatttaaaaggatctaggtgaagatcctttttgataatctcatgaccaaaatcccttaacgtgagttttcgttccactgagcgtcagaccccgtagaaaagatcaaaggatcttcttgagatcctttttttctgcgcgtaatctgctgcttgcaaacaaaaaaaccaccgctaccagcggtggtttgtttgccggatcaagagctaccaactctttttccgaaggtaactggcttcagcagagcgcagataccaaatactgtccttctagtgtagccgtagttaggccaccacttcaagaactctgtagcaccgcctacatacctcgctctgctaatcctgttaccagtggctgctgccagtggcgataagtcgtgtcttaccgggttggactcaagacgatagttaccggataaggcgcagcggtcgggctgaacggggggttcgtgcacacagcccagcttggagcgaacgacctacaccgaactgagatacctacagcgtgagctatgagaaagcgccacgcttcccgaagggagaaaggcggacaggtatccggtaagcggcagggtcggaacaggagagcgcacgagggagcttccagggggaaacgcctggtatctttatagtcctgtcgggtttcgccacctctgacttgagcgtcgatttttgtgatgctcgtcaggggggcggagcctatggaaaaacgccagcaacgcggcctttttacggttcctggccttttgctggccttttgctcacatgttctttcctgcgttatcccctgattctgtggataaccgtattaccgcctttgagtgagctgataccgctcgccgcagccgaacgaccgagcgcagcgagtcagtgagcgaggaagcgacaccatcgaatggcgcaaaacctttcgcggtatggcatgatagcgcccggaagagagtcaattcagggtggtgaatgtgaaaccagtaacgttatacgatgtcgcagagtatgccggtgtctcttatcagaccgtttcccgcgtggtgaaccaggccagccacgtttctgcgaaaacgcgggaaaaagtggaagcggcgatggcggagctgaattacattcccaaccgcgtggcacaacaactggcgggcaaacagtcgttgctgattggcgttgccacctccagtctggccctgcacgcgccgtcgcaaattgtcgcggcgattaaatctcgcgccgatcaactgggtgccagcgtggtggtgtcgatggtagaacgaagcggcgtcgaagcctgtaaagcggcggtgcacaatcttctcgcgcaacgcgtcagtgggctgatcattaactatccgctggatgaccaggatgccattgctgtggaagctgcctgcactaatgttccggcgttatttcttgatgtctctgaccagacacccatcaacagtattattttctcccatgaagacggtacgcgactgggcgtggagcatctggtcgcattgggtcaccagcaaatcgcgctgttagcgggcccattaagttctgtctcggcgcgtctgcgtctggctggctggcataaatatctcactcgcaatcaaattcagccgatagcggaacgggaaggcgactggagtgccatgtccggttttcaacaaaccatgcaaatgctgaatgagggcatcgttcccactgcgatgctggttgccaacgatcagatggcgctgggcgcaatgcgcgccattaccgagtccgggctgcgcgttggtgcggatatctcggtagtgggatacgacgataccgaagacagctcatgttatatcccgccgttaaccaccatcaaacaggattttcgcctgctggggcaaaccagcgtggaccgcttgctgcaactctctcagggccaggcggtgaagggcaatcagctgttgcccgtctcactggtgaaaagaaaaaccaccctggcgcccaatacgcaaaccgcctctccccgcgcgttggccgattcattaatgcagctggcacgacaggtttcccgactggaaagcgggcagtgagcggtacccgataaaagcggcttcctgacaggaggccgttttgttttgcagcccacctcaacgcaattaatgtgagttagctcactcattaggcaccccaggctttacactttatgcttccggctcgtatgttgtgtggaattgtgagcggataacaattgaattaaggaggatataattatgaaatacctgctgccgaccgcagccgctggtctgctgctgctcgcggcctagccggccatggccgatgttgttatgacccagtctccgtctaccctgtctgcttctgttggtgacaccatcaccatcacctgccgtgcttctcagtctatcgaaacctggctggcttggtaccagcagaaaccgggtaaagctccgaaactgctgatctacaaggcttctaccctgaaaaccggtgttccgtctcgtttctctggttctggttctggtaccgagttcaccctgaccatctctggtctgcagttcgacgacttcgctacctaccactgccagcactacgctggttactctgctaccttcggtcagggtacccgtgttgaaatcaaacgtaccgttgctgctccgtctgttttcatcttcccgccgtctgacgaacagctgaaatctggtaccgcttctgttgtttgcctgctgaacaacttctacccgcgtgaagctaaagttcagtggaaagttgacaacgctctgcagtctggtaactctcaggaatctgttaccgaacaggactctaaagactctacctactctctgtcttctaccctgaccctgtctaaagctgactacgaaaagcacaaagtttacgcttgcgaagttacccactaataactgagctctccggttaccaaatctttcaaccgtggtgaatgcggtggtggcagcggtggtggttctggtggcggtagcggcggtggctctcacccagaaacgctggtgaaagtaaaagatgctgaagatcagttgggtgcacgagtgggttacatcgaactggatctcaacagcggtaagatccttgagagttttcgccccgaagaacgttttccaatgatgagcacttttaaagttctgctatgtggcgcggtattatcccgtattgacgccgggcaagagcaactcggtcgccgcatacactattctcagaatgacttggttgagtactcaccagtcacagaaaagcatcttacggatggcatgacagtaagagaattatgcagtgctgccataaccatgagtgataacactgcggccaacttacttctgacaacgatcggaggaccgaaggagctaaccgcttttttgcacaacatgggggatcatgtaactcgccttgatcgttgggaaccggagctgaatgaagccataccaaacgacgagcgtgacaccacgatgcctgtagcaatggcaacaacgttgcgcaaactattaactggcgaactacttactctagcttcccggcaacaattaatagactggatggaggcggataaagttgcaggaccacttctgcgctcggcccttccggctggctggtttattgctgataaatctggagccggtgagcgtgggtctcgcggtatcattgcagcactggggccagatggtaagccctcccgtatcgtagttatctacacgacggggagtcaggcaactatggatgaacgaaatagacagatcgctgagataggtgcctcactgattaagcattggtaataattaattaataaggaggatataattatgaaaaagacagctatcgcgattgcagtggcactggctggtttcgctaccgtagcctaggcggccgcagaagttcagctggttgaatctggtggtggtctggttaaagctggtggttctctgatcctgtcttgcggtgtttctaacttccgtatctctgctcacaccatgaactgggttcgtcgtgttccgggtggtggtctggaatgggttgcttctatctctacctcttctacctaccgtgactacgctgacgctgttaaaggtcgtttcaccgtttctcgtgacgacctggaagacttcgtttacctgcagatgcataaaatgcgtgttgaagacaccgctatctactactgcgctcgtaaaggttctgaccgtctgtctgacaacgacccgttcgacgcttggggtccgggtaccgttgttaccgtttctccggcgtcgaccaaaggtccgtctgttttcccgctggctccgtcttctaaatctacctctggtggtaccgctgctctgggttgcctggttaaagactacttcccggaaccggttaccgtttcttggaactctggtgctctgacctctggtgttcacaccttcccggctgttctgcagtcttctggtctgtactctctgtcttctgttgttaccgttccgtcttcttctctgggtacccagacctacatctgcaacgttaaccacaaaccgtctaacaccaaagttgacaagaaagttgaaccgaaatcttgcctgcgatcgcggccaggccggccgcaccatcaccatcaccatggcgcatacccgtacgacgttccggactacgcttctactagctaacgatcgcccttcccaacagttgcgcagcctgaatggcgaatgggacgcgccctgtagcggcgcattaagcgcggcgggtgtggtggttacgcgcagcgtgaccgctacacttgccagcgccctagcgcccgctcctttcgctttcttcccttcctttctcgccacgttcgccggctttccccgtcaagctctaaatcgggggctccctttagggttccgatttagtgctttacggcacctcgaccccaaaaaacttgattagggtgatggttcacgtagtgggccatcgccctgatagacggtttttcgccctttgacgttggagtccacgttctttaatagtggactcttgttccaaactggaacaacactcaaccctatctcggtctattcttttgatttataagggattttgccgatttcggcctattggttaaaaaatgagctgatttaacaaaaatttaacgcgaattttaacaaaatattaacgcttacaatttag

SEQ ID NO: 327 - DNA, 5975 bp, Artificial Sequence
  2G12 DIQ LC** bla
gtggcacttttcggggaaatgtgcgcggaacccctatttgtttatttttctaaatacattcaaatatgtatccgctcatgagacaataaccctgataaatgcttcaataatattgaaaaaggaagagtatggagaaaaaaatcactggatataccaccgttgatatatcccaatggcatcgtaaagaacattttgaggcatttcagtcagttgctcaatgtacctataaccagaccgttcagctggatattacggcctttttaaagaccgtaaagaaaaataagcacaagttttatccggcctttattcacattcttgcccgcctgatgaatgctcatccggaattccgtatggcaatgaaagacggtgagctggtgatatgggatagtgttcacccttgttacaccgttttccatgagcaaactgaaacgttttcatcgctctggagtgaataccacgacgatttccggcagtttctacacatatattcgcaagatgtggcgtgttacggtgaaaacctggcctatttccctaaagggtttattgagaatatgtttttcgtctcagccaatccctgggtgagtttcaccagttttgatttaaacgtggccaatatggacaacttcttcgcccccgttttcaccatgggcaaatattatacgcaaggcgacaaggtgctgatgccgctggcgattcaggttcatcatgccgtttgtgatggcttccatgtcggcagaatgcttaatgaattacaacagtactgcgatgagtggcagggcggggcgtaactgtcagaccaagtttactcatatatactttagattgatttaaaacttcatttttaatttaaaaggatctaggtgaagatcctttttgataatctcatgaccaaaatcccttaacgtgagttttcgttccactgagcgtcagaccccgtagaaaagatcaaaggatcttcttgagatcctttttttctgcgcgtaatctgctgcttgcaaacaaaaaaaccaccgctaccagcggtggtttgtttgccggatcaagagctaccaactctttttccgaaggtaactggcttcagcagagcgcagataccaaatactgtccttctagtgtagccgtagttaggccaccacttcaagaactctgtagcaccgcctacatacctcgctctgctaatcctgttaccagtggctgctgccagtggcgataagtcgtgtcttaccgggttggactcaagacgatagttaccggataaggcgcagcggtcgggctgaacggggggttcgtgcacacagcccagcttggagcgaacgacctacaccgaactgagatacctacagcgtgagctatgagaaagcgccacgcttcccgaagggagaaaggcggacaggtatccggtaagcggcagggtcggaacaggagagcgcacgagggagcttccagggggaaacgcctggtatctttatagtcctgtcgggtttcgccacctctgacttgagcgtcgatttttgtgatgctcgtcaggggggcggagcctatggaaaaacgccagcaacgcggcctttttacggttcctggccttttgctggccttttgctcacatgttctttcctgcgttatcccctgattctgtggataaccgtattaccgcctttgagtgagctgataccgctcgccgcagccgaacgaccgagcgcagcgagtcagtgagcgaggaagcgacaccatcgaatggcgcaaaacctttcgcggtatggcatgatagcgcccggaagagagtcaattcagggtggtgaatgtgaaaccagtaacgttatacgatgtcgcagagtatgccggtgtctcttatcagaccgtttcccgcgtggtgaaccaggccagccacgtttctgcgaaaacgcgggaaaaagtggaagcggcgatggcggagctgaattacattcccaaccgcgtggcacaacaactggcgggcaaacagtcgttgctgattggcgttgccacctccagtctggccctgcacgcgccgtcgcaaattgtcgcggcgattaaatctcgcgccgatcaactgggtgccagcgtggtggtgtcgatggtagaacgaagcggcgtcgaagcctgtaaagcggcggtgcacaatcttctcgcgcaacgcgtcagtgggctgatcattaactatccgctggatgaccaggatgccattgctgtggaagctgcctgcactaatgttccggcgttatttcttgatgtctctgaccagacacccatcaacagtattattttctcccatgaagacggtacgcgactgggcgtggagcatctggtcgcattgggtcaccagcaaatcgcgctgttagcgggcccattaagttctgtctcggcgcgtctgcgtctggctggctggcataaatatctcactcgcaatcaaattcagccgatagcggaacgggaaggcgactggagtgccatgtccggttttcaacaaaccatgcaaatgctgaatgagggcatcgttcccactgcgatgctggttgccaacgatcagatggcgctgggcgcaatgcgcgccattaccgagtccgggctgcgcgttggtgcggatatctcggtagtgggatacgacgataccgaagacagctcatgttatatcccgccgttaaccaccatcaaacaggattttcgcctgctggggcaaaccagcgtggaccgcttgctgcaactctctcagggccaggcggtgaagggcaatcagctgttgcccgtctcactggtgaaaagaaaaaccaccctggcgcccaatacgcaaaccgcctctccccgcgcgttggccgattcattaatgcagctggcacgacaggtttcccgactggaaagcgggcagtgagcggtacccgataaaagcggcttcctgacaggaggccgttttgttttgcagcccacctcaacgcaattaatgtgagttagctcactcattaggcaccccaggctttacactttatgcttccggctcgtatgttgtgtggaattgtgagcggataacaattgaattaaggaggatataattatgaaatacctgctgccgaccgcagccgctggtctgctgctgctcgcggcctagccggccatggccgatatccagatgacccagtctccgtctaccctgtctgcttctgttggtgacaccatcaccatcacctgccgtgcttctcagtctatcgaaacctggctggcttggtaccagcagaaaccgggtaaagctccgaaactgctgatctacaaggcttctaccctgaaaaccggtgttccgtctcgtttctctggttctggttctggtaccgagttcaccctgaccatctctggtctgcagttcgacgacttcgctacctaccactgccagcactacgctggttactctgctaccttcggtcagggtacccgtgttgaaatcaaacgtaccgttgctgctccgtctgttttcatcttcccgccgtctgacgaacagctgaaatctggtaccgcttctgttgtttgcctgctgaacaacttctacccgcgtgaagctaaagttcagtggaaagttgacaacgctctgcagtctggtaactctcaggaatctgttaccgaacaggactctaaagactctacctactctctgtcttctaccctgaccctgtctaaagctgactacgaaaagcacaaagtttacgcttgcgaagttacccactaataactgagctctccggttaccaaatctttcaaccgtggtgaatgcggtggtggcagcggtggtggttctggtggcggtagcggcggtggctctcacccagaaacgctggtgaaagtaaaagatgctgaagatcagttgggtgcacgagtgggttacatcgaactggatctcaacagcggtaagatccttgagagttttcgccccgaagaacgttttccaatgatgagcacttttaaagttctgctatgtggcgcggtattatcccgtattgacgccgggcaagagcaactcggtcgccgcatacactattctcagaatgacttggttgagtactcaccagtcacagaaaagcatcttacggatggcatgacagtaagagaattatgcagtgctgccataaccatgagtgataacactgcggccaacttacttctgacaacgatcggaggaccgaaggagctaaccgcttttttgcacaacatgggggatcatgtaactcgccttgatcgttgggaaccggagctgaatgaagccataccaaacgacgagcgtgacaccacgatgcctgtagcaatggcaacaacgttgcgcaaactattaactggcgaactacttactctagcttcccggcaacaattaatagactggatggaggcggataaagttgcaggaccacttctgcgctcggcccttccggctggctggtttattgctgataaatctggagccggtgagcgtgggtctcgcggtatcattgcagcactggggccagatggtaagccctcccgtatcgtagttatctacacgacggggagtcaggcaactatggatgaacgaaatagacagatcgctgagataggtgcctcactgattaagcattggtaataattaattaataaggaggatataattatgaaaaagacagctatcgcgattgcagtggcactggctggtttcgctaccgtagcctaggcggccgcagaagttcagctggttgaatctggtggtggtctggttaaagctggtggttctctgatcctgtcttgcggtgtttctaacttccgtatctctgctcacaccatgaactgggttcgtcgtgttccgggtggtggtctggaatgggttgcttctatctctacctcttctacctaccgtgactacgctgacgctgttaaaggtcgtttcaccgtttctcgtgacgacctggaagacttcgtttacctgcagatgcataaaatgcgtgttgaagacaccgctatctactactgcgctcgtaaaggttctgaccgtctgtctgacaacgacccgttcgacgcttggggtccgggtaccgttgttaccgtttctccggcgtcgaccaaaggtccgtctgttttcccgctggctccgtcttctaaatctacctctggtggtaccgctgctctgggttgcctggttaaagactacttcccggaaccggttaccgtttcttggaactctggtgctctgacctctggtgttcacaccttcccggctgttctgcagtcttctggtctgtactctctgtcttctgttgttaccgttccgtcttcttctctgggtacccagacctacatctgcaacgttaaccacaaaccgtctaacaccaaagttgacaagaaagttgaaccgaaatcttgcctgcgatcgcggccaggccggccgcaccatcaccatcaccatggcgcatacccgtacgacgttccggactacgcttctactagctaacgatcgcccttcccaacagttgcgcagcctgaatggcgaatgggacgcgccctgtagcggcgcattaagcgcggcgggtgtggtggttacgcgcagcgtgaccgctacacttgccagcgccctagcgcccgctcctttcgctttcttcccttcctttctcgccacgttcgccggctttccccgtcaagctctaaatcgggggctccctttagggttccgatttagtgctttacggcacctcgaccccaaaaaacttgattagggtgatggttcacgtagtgggccatcgccctgatagacggtttttcgccctttgacgttggagtccacgttctttaatagtggactcttgttccaaactggaacaacactcaaccctatctcggtctattcttttgatttataagggattttgccgatttcggcctattggttaaaaaatgagctgatttaacaaaaatttaacgcgaattttaacaaaatattaacgcttacaatttag

SEQ ID NO: 328 - DNA, 5978 bp, Artificial Sequence
  2G12 HC** bla pCAL IT* CmR (DX HC** bla)
gtggcacttttcggggaaatgtgcgcggaacccctatttgtttatttttctaaatacattcaaatatgtatccgctcatgagacaataaccctgataaatgcttcaataatattgaaaaaggaagagtatggagaaaaaaatcactggatataccaccgttgatatatcccaatggcatcgtaaagaacattttgaggcatttcagtcagttgctcaatgtacctataaccagaccgttcagctggatattacggcctttttaaagaccgtaaagaaaaataagcacaagttttatccggcctttattcacattcttgcccgcctgatgaatgctcatccggaattccgtatggcaatgaaagacggtgagctggtgatatgggatagtgttcacccttgttacaccgttttccatgagcaaactgaaacgttttcatcgctctggagtgaataccacgacgatttccggcagtttctacacatatattcgcaagatgtggcgtgttacggtgaaaacctggcctatttccctaaagggtttattgagaatatgtttttcgtctcagccaatccctgggtgagtttcaccagttttgatttaaacgtggccaatatggacaacttcttcgcccccgttttcaccatgggcaaatattatacgcaaggcgacaaggtgctgatgccgctggcgattcaggttcatcatgccgtttgtgatggcttccatgtcggcagaatgcttaatgaattacaacagtactgcgatgagtggcagggcggggcgtaactgtcagaccaagtttactcatatatactttagattgatttaaaacttcatttttaatttaaaaggatctaggtgaagatcctttttgataatctcatgaccaaaatcccttaacgtgagttttcgttccactgagcgtcagaccccgtagaaaagatcaaaggatcttcttgagatcctttttttctgcgcgtaatctgctgcttgcaaacaaaaaaaccaccgctaccagcggtggtttgtttgccggatcaagagctaccaactctttttccgaaggtaactggcttcagcagagcgcagataccaaatactgtccttctagtgtagccgtagttaggccaccacttcaagaactctgtagcaccgcctacatacctcgctctgctaatcctgttaccagtggctgctgccagtggcgataagtcgtgtcttaccgggttggactcaagacgatagttaccggataaggcgcagcggtcgggctgaacggggggttcgtgcacacagcccagcttggagcgaacgacctacaccgaactgagatacctacagcgtgagctatgagaaagcgccacgcttcccgaagggagaaaggcggacaggtatccggtaagcggcagggtcggaacaggagagcgcacgagggagcttccagggggaaacgcctggtatctttatagtcctgtcgggtttcgccacctctgacttgagcgtcgatttttgtgatgctcgtcaggggggcggagcctatggaaaaacgccagcaacgcggcctttttacggttcctggccttttgctggccttttgctcacatgttctttcctgcgttatcccctgattctgtggataaccgtattaccgcctttgagtgagctgataccgctcgccgcagccgaacgaccgagcgcagcgagtcagtgagcgaggaagcgacaccatcgaatggcgcaaaacctttcgcggtatggcatgatagcgcccggaagagagtcaattcagggtggtgaatgtgaaaccagtaacgttatacgatgtcgcagagtatgccggtgtctcttatcagaccgtttcccgcgtggtgaaccaggccagccacgtttctgcgaaaacgcgggaaaaagtggaagcggcgatggcggagctgaattacattcccaaccgcgtggcacaacaactggcgggcaaacagtcgttgctgattggcgttgccacctccagtctggccctgcacgcgccgtcgcaaattgtcgcggcgattaaatctcgcgccgatcaactgggtgccagcgtggtggtgtcgatggtagaacgaagcggcgtcgaagcctgtaaagcggcggtgcacaatcttctcgcgcaacgcgtcagtgggctgatcattaactatccgctggatgaccaggatgccattgctgtggaagctgcctgcactaatgttccggcgttatttcttgatgtctctgaccagacacccatcaacagtattattttctcccatgaagacggtacgcgactgggcgtggagcatctggtcgcattgggtcaccagcaaatcgcgctgttagcgggcccattaagttctgtctcggcgcgtctgcgtctggctggctggcataaatatctcactcgcaatcaaattcagccgatagcggaacgggaaggcgactggagtgccatgtccggttttcaacaaaccatgcaaatgctgaatgagggcatcgttcccactgcgatgctggttgccaacgatcagatggcgctgggcgcaatgcgcgccattaccgagtccgggctgcgcgttggtgcggatatctcggtagtgggatacgacgataccgaagacagctcatgttatatcccgccgttaaccaccatcaaacaggattttcgcctgctggggcaaaccagcgtggaccgcttgctgcaactctctcagggccaggcggtgaagggcaatcagctgttgcccgtctcactggtgaaaagaaaaaccaccctggcgcccaatacgcaaaccgcctctccccgcgcgttggccgattcattaatgcagctggcacgacaggtttcccgactggaaagcgggcagtgagcggtacccgataaaagcggcttcctgacaggaggccgttttgttttgcagcccacctcaacgcaattaatgtgagttagctcactcattaggcaccccaggctttacactttatgcttccggctcgtatgttgtgtggaattgtgagcggataacaattgaattaaggaggatataattatgaaatacctgctgccgaccgcagccgctggtctgctgctgctcgcggcctagccggccatggccgccggtgttgttatgacccagtctccgtctaccctgtctgcttctgttggtgacaccatcaccatcacctgccgtgcttctcagtctatcgaaacctggctggcttggtaccagcagaaaccgggtaaagctccgaaactgctgatctacaaggcttctaccctgaaaaccggtgttccgtctcgtttctctggttctggttctggtaccgagttcaccctgaccatctctggtctgcagttcgacgacttcgctacctaccactgccagcactacgctggttactctgctaccttcggtcagggtacccgtgttgaaatcaaacgtaccgttgctgctccgtctgttttcatcttcccgccgtctgacgaacagctgaaatctggtaccgcttctgttgtttgcctgctgaacaacttctacccgcgtgaagctaaagttcagtggaaagttgacaacgctctgcagtctggtaactctcaggaatctgttaccgaacaggactctaaagactctacctactctctgtcttctaccctgaccctgtctaaagctgactacgaaaagcacaaagtttacgcttgcgaagttacccaccagggtctgagctctccggttaccaaatctttcaaccgtggtgaatgctaattaattaataaggaggatataattatgaaaaagacagctatcgcgattgcagtggcactggctggtttcgctaccgtagcctaggcggccgcagaagttcagctggttgaatctggtggtggtctggttaaagctggtggttctctgatcctgtcttgcggtgtttctaacttccgtatctctgctcacaccatgaactgggttcgtcgtgttccgggtggtggtctggaatgggttgcttctatctctacctcttctacctaccgtgactacgctgacgctgttaaaggtcgtttcaccgtttctcgtgacgacctggaagacttcgtttacctgcagatgcataaaatgcgtgttgaagacaccgctatctactactgcgctcgtaaaggttctgaccgtctgtctgacaacgacccgttcgacgcttggggtccgggtaccgttgttaccgtttaataagcgtcgaccaaaggtccgtctgttttcccgctggctccgtcttctaaatctacctctggtggtaccgctgctctgggttgcctggttaaagactacttcccggaaccggttaccgtttcttggaactctggtgctctgacctctggtgttcacaccttcccggctgttctgcagtcttctggtctgtactctctgtcttctgttgttaccgttccgtcttcttctctgggtacccagacctacatctgcaacgttaaccacaaaccgtctaacaccaaagttgacaagaaagttgaaccgaaatcttgcctgcgatcgcggccaggccggccgcaccatcaccatcaccatggcgcatacccgtacgacgttccggactacgcttctggtggtggcagcggtggtggttctggtggcggtagcggcggtggctctcacccagaaacgctggtgaaagtaaaagatgctgaagatcagttgggtgcacgagtgggttacatcgaactggatctcaacagcggtaagatccttgagagttttcgccccgaagaacgttttccaatgatgagcacttttaaagttctgctatgtggcgcggtattatcccgtattgacgccgggcaagagcaactcggtcgccgcatacactattctcagaatgacttggttgagtactcaccagtcacagaaaagcatcttacggatggcatgacagtaagagaattatgcagtgctgccataaccatgagtgataacactgcggccaacttacttctgacaacgatcggaggaccgaaggagctaaccgcttttttgcacaacatgggggatcatgtaactcgccttgatcgttgggaaccggagctgaatgaagccataccaaacgacgagcgtgacaccacgatgcctgtagcaatggcaacaacgttgcgcaaactattaactggcgaactacttactctagcttcccggcaacaattaatagactggatggaggcggataaagttgcaggaccacttctgcgctcggcccttccggctggctggtttattgctgataaatctggagccggtgagcgtgggtctcgcggtatcattgcagcactggggccagatggtaagccctcccgtatcgtagttatctacacgacggggagtcaggcaactatggatgaacgaaatagacagatcgctgagataggtgcctcactgattaagcattggtaagctagctaacgatcgcccttcccaacagttgcgcagcctgaatggcgaatgggacgcgccctgtagcggcgcattaagcgcggcgggtgtggtggttacgcgcagcgtgaccgctacacttgccagcgccctagcgcccgctcctttcgctttcttcccttcctttctcgccacgttcgccggctttccccgtcaagctctaaatcgggggctccctttagggttccgatttagtgctttacggcacctcgaccccaaaaaacttgattagggtgatggttcacgtagtgggccatcgccctgatagacggtttttcgccctttgacgttggagtccacgttctttaatagtggactcttgttccaaactggaacaacactcaaccctatctcggtctattcttttgatttataagggattttgccgatttcggcctattggttaaaaaatgagctgatttaacaaaaatttaacgcgaattttaacaaaatattaacgcttacaatttag

SEQ ID NO: 329 - DNA, 660 bp, Artificial Sequence
  CmR
atggagaaaaaaatcactggatataccaccgttgatatatcccaatggcatcgtaaagaacattttgaggcatttcagtcagttgctcaatgtacctataaccagaccgttcagctggatattacggcctttttaaagaccgtaaagaaaaataagcacaagttttatccggcctttattcacattcttgcccgcctgatgaatgctcatccggaattccgtatggcaatgaaagacggtgagctggtgatatgggatagtgttcacccttgttacaccgttttccatgagcaaactgaaacgttttcatcgctctggagtgaataccacgacgatttccggcagtttctacacatatattcgcaagatgtggcgtgttacggtgaaaacctggcctatttccctaaagggtttattgagaatatgtttttcgtctcagccaatccctgggtgagtttcaccagttttgatttaaacgtggccaatatggacaacttcttcgcccccgttttcaccatgggcaaatattatacgcaaggcgacaaggtgctgatgccgctggcgattcaggttcatcatgccgtctgtgatggcttccatgtcggcagaatgcttaatgaattacaacagtactgcgatgagtggcagggcggggcgtaa

SEQ ID NO: 330 - DNA, 5681 bp, Artificial Sequence
  2G12 pCAL IT* CmR
gtggcacttttcggggaaatgtgcgcggaacccctatttgtttatttttctaaatacattcaaatatgtatccgctcatgagacaataaccctgataaatgcttcaataatattgaaaaaggaagagtatggagaaaaaaatcactggatataccaccgttgatatatcccaatggcatcgtaaagaacattttgaggcatttcagtcagttgctcaatgtacctataaccagaccgttcagctggatattacggcctttttaaagaccgtaaagaaaaataagcacaagttttatccggcctttattcacattcttgcccgcctgatgaatgctcatccggaattccgtatggcaatgaaagacggtgagctggtgatatgggatagtgttcacccttgttacaccgttttccatgagcaaactgaaacgttttcatcgctctggagtgaataccacgacgatttccggcagtttctacacatatattcgcaagatgtggcgtgttacggtgaaaacctggcctatttccctaaagggtttattgagaatatgtttttcgtctcagccaatccctgggtgagtttcaccagttttgatttaaacgtggccaatatggacaacttcttcgcccccgttttcaccatgggcaaatattatacgcaaggcgacaaggtgctgatgccgctggcgattcaggttcatcatgccgtttgtgatggcttccatgtcggcagaatgcttaatgaattacaacagtactgcgatgagtggcagggcggggcgtaactgtcagaccaagtttactcatatatactttagattgatttaaaacttcatttttaatttaaaaggatctaggtgaagatcctttttgataatctcatgaccaaaatcccttaacgtgagttttcgttccactgagcgtcagaccccgtagaaaagatcaaaggatcttcttgagatcctttttttctgcgcgtaatctgctgcttgcaaacaaaaaaaccaccgctaccagcggtggtttgtttgccggatcaagagctaccaactctttttccgaaggtaactggcttcagcagagcgcagataccaaatactgtccttctagtgtagccgtagttaggccaccacttcaagaactctgtagcaccgcctacatacctcgctctgctaatcctgttaccagtggctgctgccagtggcgataagtcgtgtcttaccgggttggactcaagacgatagttaccggataaggcgcagcggtcgggctgaacggggggttcgtgcacacagcccagcttggagcgaacgacctacaccgaactgagatacctacagcgtgagctatgagaaagcgccacgcttcccgaagggagaaaggcggacaggtatccggtaagcggcagggtcggaacaggagagcgcacgagggagcttccagggggaaacgcctggtatctttatagtcctgtcgggtttcgccacctctgacttgagcgtcgatttttgtgatgctcgtcaggggggcggagcctatggaaaaacgccagcaacgcggcctttttacggttcctggccttttgctggccttttgctcacatgttctttcctgcgttatcccctgattctgtggataaccgtattaccgcctttgagtgagctgataccgctcgccgcagccgaacgaccgagcgcagcgagtcagtgagcgaggaagcgacaccatcgaatggcgcaaaacctttcgcggtatggcatgatagcgcccggaagagagtcaattcagggtggtgaatgtgaaaccagtaacgttatacgatgtcgcagagtatgccggtgtctcttatcagaccgtttcccgcgtggtgaaccaggccagccacgtttctgcgaaaacgcgggaaaaagtggaagcggcgatggcggagctgaattacattcccaaccgcgtggcacaacaactggcgggcaaacagtcgttgctgattggcgttgccacctccagtctggccctgcacgcgccgtcgcaaattgtcgcggcgattaaatctcgcgccgatcaactgggtgccagcgtggtggtgtcgatggtagaacgaagcggcgtcgaagcctgtaaagcggcggtgcacaatcttctcgcgcaacgcgtcagtgggctgatcattaactatccgctggatgaccaggatgccattgctgtggaagctgcctgcactaatgttccggcgttatttcttgatgtctctgaccagacacccatcaacagtattattttctcccatgaagacggtacgcgactgggcgtggagcatctggtcgcattgggtcaccagcaaatcgcgctgttagcgggcccattaagttctgtctcggcgcgtctgcgtctggctggctggcataaatatctcactcgcaatcaaattcagccgatagcggaacgggaaggcgactggagtgccatgtccggttttcaacaaaccatgcaaatgctgaatgagggcatcgttcccactgcgatgctggttgccaacgatcagatggcgctgggcgcaatgcgcgccattaccgagtccgggctgcgcgttggtgcggatatctcggtagtgggatacgacgataccgaagacagctcatgttatatcccgccgttaaccaccatcaaacaggattttcgcctgctggggcaaaccagcgtggaccgcttgctgcaactctctcagggccaggcggtgaagggcaatcagctgttgcccgtctcactggtgaaaagaaaaaccaccctggcgcccaatacgcaaaccgcctctccccgcgcgttggccgattcattaatgcagctggcacgacaggtttcccgactggaaagcgggcagtgagcggtacccgataaaagcggcttcctgacaggaggccgttttgttttgcagcccacctcaacgcaattaatgtgagttagctcactcattaggcaccccaggctttacactttatgcttccggctcgtatgttgtgtggaattgtgagcggataacaattgaattaaggaggatataattatgaaatacctgctgccgaccgcagccgctggtctgctgctgctcgcggcctagccggccatggccgccggtgttgttatgacccagtctccgtctaccctgtctgcttctgttggtgacaccatcaccatcacctgccgtgcttctcagtctatcgaaacctggctggcttggtaccagcagaaaccgggtaaagctccgaaactgctgatctacaaggcttctaccctgaaaaccggtgttccgtctcgtttctctggttctggttctggtaccgagttcaccctgaccatctctggtctgcagttcgacgacttcgctacctaccactgccagcactacgctggttactctgctaccttcggtcagggtacccgtgttgaaatcaaacgtaccgttgctgctccgtctgttttcatcttcccgccgtctgacgaacagctgaaatctggtaccgcttctgttgtttgcctgctgaacaacttctacccgcgtgaagctaaagttcagtggaaagttgacaacgctctgcagtctggtaactctcaggaatctgttaccgaacaggactctaaagactctacctactctctgtcttctaccctgaccctgtctaaagctgactacgaaaagcacaaagtttacgcttgcgaagttacccaccagggtctgagctctccggttaccaaatctttcaaccgtggtgaatgctaattaattaataaggaggatataattatgaaaaagacagctatcgcgattgcagtggcactggctggtttcgctaccgtagcctaggcggccgcagaagttcagctggttgaatctggtggtggtctggttaaagctggtggttctctgatcctgtcttgcggtgtttctaacttccgtatctctgctcacaccatgaactgggttcgtcgtgttccgggtggtggtctggaatgggttgcttctatctctacctcttctacctaccgtgactacgctgacgctgttaaaggtcgtttcaccgtttctcgtgacgacctggaagacttcgtttacctgcagatgcataaaatgcgtgttgaagacaccgctatctactactgcgctcgtaaaggttctgaccgtctgtctgacaacgacccgttcgacgcttggggtccgggtaccgttgttaccgtttctccggcgtcgaccaaaggtccgtctgttttcccgctggctccgtcttctaaatctacctctggtggtaccgctgctctgggttgcctggttaaagactacttcccggaaccggttaccgtttcttggaactctggtgctctgacctctggtgttcacaccttcccggctgttctgcagtcttctggtctgtactctctgtcttctgttgttaccgttccgtcttcttctctgggtacccagacctacatctgcaacgttaaccacaaaccgtctaacaccaaagttgacaagaaagttgaaccgaaatcttgcctgcgatcgcggccaggccggccgcaccatcaccatcaccatggcgcatacccgtacgacgttccggactacgcttctactagttaggagggtggtggctctgagggtggcggttctgagggtggcggctctgagggaggcggttccggtggtggctctggttccggtgattttgattatgaaaagatggcaaacgctaataagggggctatgaccgaaaatgccgatgaaaacgcgctacagtctgacgctaaaggcaaacttgattctgtcgctactgattacggtgctgctatcgatggtttcattggtgacgtttccggccttgctaatggtaatggtgctactggtgattttgctggctctaattcccaaatggctcaagtcggtgacggtgataattcacctttaatgaataatttccgtcaatatttaccttccctccctcaatcggttgaatgtcgcccttttgtctttggcgctggtaaaccatatgaattttctattgattgtgacaaaataaacttattccgtggtgtctttgcgtttcttttatatgttgccacctttatgtatgtattttctacgtttgctaacatactgcgtaataaggagtcttaagctagctaacgatcgcccttcccaacagttgcgcagcctgaatggcgaatgggacgcgccctgtagcggcgcattaagcgcggcgggtgtggtggttacgcgcagcgtgaccgctacacttgccagcgccctagcgcccgctcctttcgctttcttcccttcctttctcgccacgttcgccggctttccccgtcaagctctaaatcgggggctccctttagggttccgatttagtgctttacggcacctcgaccccaaaaaacttgattagggtgatggttcacgtagtgggccatcgccctgatagacggtttttcgccctttgacgttggagtccacgttctttaatagtggactcttgttccaaactggaacaacactcaaccctatctcggtctattcttttgatttataagggattttgccgatttcggcctattggttaaaaaatgagctgatttaacaaaaatttaacgcgaattttaacaaaatattaacgcttacaatttag

SEQ ID NO: 331 - DNA, 3754 bp, Artificial Sequence
  pENTR 1A vector
ctttcctgcgttatcccctgattctgtggataaccgtattaccgctagcatggatctcggggacgtctaactactaagcgagagtagggaactgccaggcatcaaataaaacgaaaggctcagtcggaagactgggcctttcgttttatctgttgtttgtcggtgaacgctctcctgagtaggacaaatccgccgggagcggatttgaacgttgtgaagcaacggcccggagggtggcgggcaggacgcccgccataaactgccaggcatcaaactaagcagaaggccatcctgacggatggcctttttgcgtttctacaaactcttcctgttagttagttacttaagctcgggccccaaataatgattttattttgactgatagtgacctgttcgttgcaacaaattgataagcaatgcttttttataatgccaactttgtacaaaaaagcaggctttaaaggaaccaattcagtcgactggatccggtaccgaattcgcggccgcattaggcaccccaggctttacactttatgcttccggctcgtataatgtgtggattttgagttaggatccgtcgagattttcaggagctaaggaagctaaaatggagaaaaaaatcactggatataccaccgttgatatatcccaatggcatcgtaaagaacattttgaggcatttcagtcagttgctcaatgtacctataaccagaccgttcagctggatattacggcctttttaaagaccgtaaagaaaaataagcacaagttttatccggcctttattcacattcttgcccgcctgatgaatgctcatccggaattccgtatggcaatgaaagacggtgagctggtgatatgggatagtgttcacccttgttacaccgttttccatgagcaaactgaaacgttttcatcgctctggagtgaataccacgacgatttccggcagtttctacacatatattcgcaagatgtggcgtgttacggtgaaaacctggcctatttccctaaagggtttattgagaatatgtttttcgtctcagccaatccctgggtgagtttcaccagttttgatttaaacgtggccaatatggacaacttcttcgcccccgttttcaccatgggcaaatattatacgcaaggcgacaaggtgctgatgccgctggcgattcaggttcatcatgccgtttgtgatggcttccatgtcggcagaatgcttaatgaattacaacagtactgcgatgagtggcaggcggggcgtaatctagaggatccggcttactaaaagccagataacagtatgcgtatttgcgcgctgatttttgcggtataagaatatatactgatatgtatacccgaagtatgtcaaaaagaggtatgctatgaagcagcgtattacagtgacagttgacagcgacagctatcagttgctcaaggcatatatgatgtcaatatctccggtctggtaagcacaaccatgcagaatgaagcccgtcgtctgcgtgccgaacgctggaaagcggaaaatcaggaagggatggctgaggtcgcccggtttattgaaatgaacggctcttttgctgacgagaacaggggctggtgaaatgcagtttaaggtttacacctataaaagagagagccgttatcgtctgtttgtggatgtacagagtgatattattgacacgcccgggcgacggatggtgatccccctggccagtgcacgtctgctgtcagataaagtcccccgtgaactttacccggtggtgcatatcggggatgaaagctggcgcatgatgaccaccgatatggccagtgtgccggtctccgttatcggggaagaagtggctgatctcagccaccgcgaaaatgacatcaaaaacgccattaacctgatgttctggggaatataaatgtcaggctcccttatacacagccagtctgcaggtcgacgaattcgcggccgcactcgagatatctagacccagctttcttgtacaaagttggcattataagaaagcattgcttatcaatttgttgcaacgaacaggtcactatcagtcaaaataaaatcattatttgccatccagctgcagctctggcccgtgtctcaaaatctctgatgttacattgcacaagataaaaatatatcatcatgaacaataaaactgtctgcttacataaacagtaatacaaggggtgttatgagccatattcaacgggaaacgtcgaggccgcgattaaattccaacatggatgctgatttatatgggtataaatgggctcgcgataatgtcgggcaatcaggtgcgacaatctatcgcttgtatgggaagcccgatgcgccagagttgtttctgaaacatggcaaaggtagcgttgccaatgatgttacagatgagatggtcagactaaactggctgacggaatttatgcctcttccgaccatcaagcattttatccgtactcctgatgatgcatggttactcaccactgcgatccccggaaaaacagcattccaggtattagaagaatatcctgattcaggtgaaaatattgttgatgcgctggcagtgtccctgcgccggttgcattcgattcctgtttgtaattgtccttttaacagcgatcgcgtatttcgtctcgctcaggcgcaatcacgaatgaataacggtttggttgatgcgagtgattttgatgacgagcgtaatggctggcctgttgaacaagtctggaaagaaatgcataaacttttgccattctcaccggattcagtcgtcactcatggtgatttctcacttgataaccttatttttgacgaggggaaattaataggttgtattgatgttggacgagtcggaatcgcagaccgataccaggatcttgccatcctatggaactgcctcggtgagttttctccttcattacagaaacggctttttcaaaaatatggtattgataatcctgatatgaataaattgcagtttcatttgatgctcgatgagtttttctaatcagaattggttaattggttgtaacattattcagattgggccccgttccactgagcgtcagaccccgtagaaaagatcaaaggatcttcttgagatcctttttttctgcgcgtaatctgctgcttgcaaacaaaaaaaccaccgctaccagcggtggtttgtttgccggatcaagagctaccaactctttttccgaaggtaactggcttcagcagagcgcagataccaaatactgttcttctagtgtagccgtagttaggccaccacttcaagaactctgtagcaccgcctacatacctcgctctgctaatcctgttaccagtggctgctgccagtggcgataagtcgtgtcttaccgggttggactcaagacgatagttaccggataaggcgcagcggtcgggctgaacggggggttcgtgcacacagcccagcttggagcgaacgacctacaccgaactgagatacctacagcgtgagctatgagaaagcgccacgcttcccgaagggagaaaggcggacaggtatccggtaagcggcagggtcggaacaggagagcgcacgagggagcttccagggggaaacgcctggtatctttatagtcctgtcgggtttcgccacctctgacttgagcgtcgatttttgtgatgctcgtcaggggggcggagcctatggaaaaacgccagcaacgcggcctttttacggttcctggccttttgctggccttttgctcacatgtt

SEQ ID NO: 332 - protein, 6 aa, Artificial Sequence
  HexaHis Tag
HHHHHH

SEQ ID NO: 333 - DNA, 5882 bp, Artificial Sequence
  2G12 3Ala Fab pCAL IT* SacI
gtggcacttttcggggaaatgtgcgcggaacccctatttgtttatttttctaaatacattcaaatatgtatccgctcatgagacaataaccctgataaatgcttcaataatattgaaaaaggaagagtatgagtattcaacatttccgtgtcgcccttattcccttttttgcggcattttgccttcctgtttttgctcacccagaaacgctggtgaaagtaaaagatgctgaagatcagttgggtgcacgagtgggttacatcgaactggatctcaacagcggtaagatccttgagagttttcgccccgaagaacgttttccaatgatgagcacttttaaagttctgctatgtggcgcggtattatcccgtattgacgccgggcaagagcaactcggtcgccgcatacactattctcagaatgacttggttgagtactcaccagtcacagaaaagcatcttacggatggcatgacagtaagagaattatgcagtgctgccataaccatgagtgataacactgcggccaacttacttctgacaacgatcggaggaccgaaggagctaaccgcttttttgcacaacatgggggatcatgtaactcgccttgatcgttgggaaccggagctgaatgaagccataccaaacgacgagcgtgacaccacgatgcctgtagcaatggcaacaacgttgcgcaaactattaactggcgaactacttactctagcttcccggcaacaattaatagactggatggaggcggataaagttgcaggaccacttctgcgctcggcccttccggctggctggtttattgctgataaatctggagccggtgagcgtgggtctcgcggtatcattgcagcactggggccagatggtaagccctcccgtatcgtagttatctacacgacggggagtcaggcaactatggatgaacgaaatagacagatcgctgagataggtgcctcactgattaagcattggtaactgtcagaccaagtttactcatatatactttagattgatttaaaacttcatttttaatttaaaaggatctaggtgaagatcctttttgataatctcatgaccaaaatcccttaacgtgagttttcgttccactgagcgtcagaccccgtagaaaagatcaaaggatcttcttgagatcctttttttctgcgcgtaatctgctgcttgcaaacaaaaaaaccaccgctaccagcggtggtttgtttgccggatcaagagctaccaactctttttccgaaggtaactggcttcagcagagcgcagataccaaatactgtccttctagtgtagccgtagttaggccaccacttcaagaactctgtagcaccgcctacatacctcgctctgctaatcctgttaccagtggctgctgccagtggcgataagtcgtgtcttaccgggttggactcaagacgatagttaccggataaggcgcagcggtcgggctgaacggggggttcgtgcacacagcccagcttggagcgaacgacctacaccgaactgagatacctacagcgtgagctatgagaaagcgccacgcttcccgaagggagaaaggcggacaggtatccggtaagcggcagggtcggaacaggagagcgcacgagggagcttccagggggaaacgcctggtatctttatagtcctgtcgggtttcgccacctctgacttgagcgtcgatttttgtgatgctcgtcaggggggcggagcctatggaaaaacgccagcaacgcggcctttttacggttcctggccttttgctggccttttgctcacatgttctttcctgcgttatcccctgattctgtggataaccgtattaccgcctttgagtgagctgataccgctcgccgcagccgaacgaccgagcgcagcgagtcagtgagcgaggaagcgacaccatcgaatggcgcaaaacctttcgcggtatggcatgatagcgcccggaagagagtcaattcagggtggtgaatgtgaaaccagtaacgttatacgatgtcgcagagtatgccggtgtctcttatcagaccgtttcccgcgtggtgaaccaggccagccacgtttctgcgaaaacgcgggaaaaagtggaagcggcgatggcggagctgaattacattcccaaccgcgtggcacaacaactggcgggcaaacagtcgttgctgattggcgttgccacctccagtctggccctgcacgcgccgtcgcaaattgtcgcggcgattaaatctcgcgccgatcaactgggtgccagcgtggtggtgtcgatggtagaacgaagcggcgtcgaagcctgtaaagcggcggtgcacaatcttctcgcgcaacgcgtcagtgggctgatcattaactatccgctggatgaccaggatgccattgctgtggaagctgcctgcactaatgttccggcgttatttcttgatgtctctgaccagacacccatcaacagtattattttctcccatgaagacggtacgcgactgggcgtggagcatctggtcgcattgggtcaccagcaaatcgcgctgttagcgggcccattaagttctgtctcggcgcgtctgcgtctggctggctggcataaatatctcactcgcaatcaaattcagccgatagcggaacgggaaggcgactggagtgccatgtccggttttcaacaaaccatgcaaatgctgaatgagggcatcgttcccactgcgatgctggttgccaacgatcagatggcgctgggcgcaatgcgcgccattaccgagtccgggctgcgcgttggtgcggatatctcggtagtgggatacgacgataccgaagacagctcatgttatatcccgccgttaaccaccatcaaacaggattttcgcctgctggggcaaaccagcgtggaccgcttgctgcaactctctcagggccaggcggtgaagggcaatcagctgttgcccgtctcactggtgaaaagaaaaaccaccctggcgcccaatacgcaaaccgcctctccccgcgcgttggccgattcattaatgcagctggcacgacaggtttcccgactggaaagcgggcagtgagcggtacccgataaaagcggcttcctgacaggaggccgttttgttttgcagcccacctcaacgcaattaatgtgagttagctcactcattaggcaccccaggctttacactttatgcttccggctcgtatgttgtgtggaattgtgagcggataacaattgaattaaggaggatataattatgaaatacctgctgccgaccgcagccgctggtctgctgctgctcgcggcctagccggccatggccgccggtgttgttatgacccagtctccgtctaccctgtctgcttctgttggtgacaccatcaccatcacctgccgtgcttctcagtctatcgaaacctggctggcttggtaccagcagaaaccgggtaaagctccgaaactgctgatctacaaggcttctaccctgaaaaccggtgttccgtctcgtttctctggttctggttctggtaccgagttcaccctgaccatctctggtctgcagttcgacgacttcgctacctaccactgccagcactacgctggttactctgctaccttcggtcagggtacccgtgttgaaatcaaacgtaccgttgctgctccgtctgttttcatcttcccgccgtctgacgaacagctgaaatctggtaccgcttctgttgtttgcctgctgaacaacttctacccgcgtgaagctaaagttcagtggaaagttgacaacgctctgcagtctggtaactctcaggaatctgttaccgaacaggactctaaagactctacctactctctgtcttctaccctgaccctgtctaaagctgactacgaaaagcacaaagtttacgcttgcgaagttacccaccagggtctgagctctccggttaccaaatctttcaaccgtggtgaatgctaattaattaataaggaggatataattatgaaaaagacagctatcgcgattgcagtggcactggctggtttcgctaccgtagcctaggcggccgcagaagttcagctggttgaatctggtggtggtctggttaaagctggtggttctctgatcctgtcttgcggtgtttctaacttccgtatctctgctcacaccatgaactgggttcgtcgtgttccgggtggtggtctggaatgggttgcttctatctctacctcttctacctaccgtgactacgctgacgctgttaaaggtcgtttcaccgtttctcgtgacgacctggaagacttcgtttacctgcagatgcataaaatgcgtgttgaagacaccgctatctactactgcgctcgtaaaggttctgaccgtgcggcggacgcggacccgttcgacgcttggggtccgggtaccgttgttaccgtttctccggcgtcgaccaaaggtccgtctgttttcccgctggctccgtcttctaaatctacctctggtggtaccgctgctctgggttgcctggttaaagactacttcccggaaccggttaccgtttcttggaactctggtgctctgacctctggtgttcacaccttcccggctgttctgcagtcttctggtctgtactctctgtcttctgttgttaccgttccgtcttcttctctgggtacccagacctacatctgcaacgttaaccacaaaccgtctaacaccaaagttgacaagaaagttgaaccgaaatcttgcctgcgatcgcggccaggccggccgcaccatcaccatcaccatggcgcatacccgtacgacgttccggactacgcttctactagttaggagggtggtggctctgagggtggcggttctgagggtggcggctctgagggaggcggttccggtggtggctctggttccggtgattttgattatgaaaagatggcaaacgctaataagggggctatgaccgaaaatgccgatgaaaacgcgctacagtctgacgctaaaggcaaacttgattctgtcgctactgattacggtgctgctatcgatggtttcattggtgacgtttccggccttgctaatggtaatggtgctactggtgattttgctggctctaattcccaaatggctcaagtcggtgacggtgataattcacctttaatgaataatttccgtcaatatttaccttccctccctcaatcggttgaatgtcgcccttttgtctttggcgctggtaaaccatatgaattttctattgattgtgacaaaataaacttattccgtggtgtctttgcgtttcttttatatgttgccacctttatgtatgtattttctacgtttgctaacatactgcgtaataaggagtcttaagctagctaacgatcgcccttcccaacagttgcgcagcctgaatggcgaatgggacgcgccctgtagcggcgcattaagcgcggcgggtgtggtggttacgcgcagcgtgaccgctacacttgccagcgccctagcgcccgctcctttcgctttcttcccttcctttctcgccacgttcgccggctttccccgtcaagctctaaatcgggggctccctttagggttccgatttagtgctttacggcacctcgaccccaaaaaacttgattagggtgatggttcacgtagtgggccatcgccctgatagacggtttttcgccctttgacgttggagtccacgttctttaatagtggactcttgttccaaactggaacaacactcaaccctatctcggtctattcttttgatttataagggattttgccgatttcggcctattggttaaaaaatgagctgatttaacaaaaatttaacgcgaattttaacaaaatattaacgcttacaatttag

SEQ ID NO: 334 - DNA, 5681 bp, Artificial Sequence; identical to SEQ ID NO: 330
  2G12 Fab pCAL IT* Sac I CmR

SEQ ID NO: 335 - DNA, 5879 bp, Artificial Sequence
  2G12 Fab DIQ pCAL IT* Sac I
gtggcacttttcggggaaatgtgcgcggaacccctatttgtttatttttctaaatacattcaaatatgtatccgctcatgagacaataaccctgataaatgcttcaataatattgaaaaaggaagagtatgagtattcaacatttccgtgtcgcccttattcccttttttgcggcattttgccttcctgtttttgctcacccagaaacgctggtgaaagtaaaagatgctgaagatcagttgggtgcacgagtgggttacatcgaactggatctcaacagcggtaagatccttgagagttttcgccccgaagaacgttttccaatgatgagcacttttaaagttctgctatgtggcgcggtattatcccgtattgacgccgggcaagagcaactcggtcgccgcatacactattctcagaatgacttggttgagtactcaccagtcacagaaaagcatcttacggatggcatgacagtaagagaattatgcagtgctgccataaccatgagtgataacactgcggccaacttacttctgacaacgatcggaggaccgaaggagctaaccgcttttttgcacaacatgggggatcatgtaactcgccttgatcgttgggaaccggagctgaatgaagccataccaaacgacgagcgtgacaccacgatgcctgtagcaatggcaacaacgttgcgcaaactattaactggcgaactacttactctagcttcccggcaacaattaatagactggatggaggcggataaagttgcaggaccacttctgcgctcggcccttccggctggctggtttattgctgataaatctggagccggtgagcgtgggtctcgcggtatcattgcagcactggggccagatggtaagccctcccgtatcgtagttatctacacgacggggagtcaggcaactatggatgaacgaaatagacagatcgctgagataggtgcctcactgattaagcattggtaactgtcagaccaagtttactcatatatactttagattgatttaaaacttcatttttaatttaaaaggatctaggtgaagatcctttttgataatctcatgaccaaaatcccttaacgtgagttttcgttccactgagcgtcagaccccgtagaaaagatcaaaggatcttcttgagatcctttttttctgcgcgtaatctgctgcttgcaaacaaaaaaaccaccgctaccagcggtggtttgtttgccggatcaagagctaccaactctttttccgaaggtaactggcttcagcagagcgcagataccaaatactgtccttctagtgtagccgtagttaggccaccacttcaagaactctgtagcaccgcctacatacctcgctctgctaatcctgttaccagtggctgctgccagtggcgataagtcgtgtcttaccgggttggactcaagacgatagttaccggataaggcgcagcggtcgggctgaacggggggttcgtgcacacagcccagcttggagcgaacgacctacaccgaactgagatacctacagcgtgagctatgagaaagcgccacgcttcccgaagggagaaaggcggacaggtatccggtaagcggcagggtcggaacaggagagcgcacgagggagcttccagggggaaacgcctggtatctttatagtcctgtcgggtttcgccacctctgacttgagcgtcgatttttgtgatgctcgtcaggggggcggagcctatggaaaaacgccagcaacgcggcctttttacggttcctggccttttgctggccttttgctcacatgttctttcctgcgttatcccctgattctgtggataaccgtattaccgcctttgagtgagctgataccgctcgccgcagccgaacgaccgagcgcagcgagtcagtgagcgaggaagcgacaccatcgaatggcgcaaaacctttcgcggtatggcatgatagcgcccggaagagagtcaattcagggtggtgaatgtgaaaccagtaacgttatacgatgtcgcagagtatgccggtgtctcttatcagaccgtttcccgcgtggtgaaccaggccagccacgtttctgcgaaaacgcgggaaaaagtggaagcggcgatggcggagctgaattacattcccaaccgcgtggcacaacaactggcgggcaaacagtcgttgctgattggcgttgccacctccagtctggccctgcacgcgccgtcgcaaattgtcgcggcgattaaatctcgcgccgatcaactgggtgccagcgtggtggtgtcgatggtagaacgaagcggcgtcgaagcctgtaaagcggcggtgcacaatcttctcgcgcaacgcgtcagtgggctgatcattaactatccgctggatgaccaggatgccattgctgtggaagctgcctgcactaatgttccggcgttatttcttgatgtctctgaccagacacccatcaacagtattattttctcccatgaagacggtacgcgactgggcgtggagcatctggtcgcattgggtcaccagcaaatcgcgctgttagcgggcccattaagttctgtctcggcgcgtctgcgtctggctggctggcataaatatctcactcgcaatcaaattcagccgatagcggaacgggaaggcgactggagtgccatgtccggttttcaacaaaccatgcaaatgctgaatgagggcatcgttcccactgcgatgctggttgccaacgatcagatggcgctgggcgcaatgcgcgccattaccgagtccgggctgcgcgttggtgcggatatctcggtagtgggatacgacgataccgaagacagctcatgttatatcccgccgttaaccaccatcaaacaggattttcgcctgctggggcaaaccagcgtggaccgcttgctgcaactctctcagggccaggcggtgaagggcaatcagctgttgcccgtctcactggtgaaaagaaaaaccaccctggcgcccaatacgcaaaccgcctctccccgcgcgttggccgattcattaatgcagctggcacgacaggtttcccgactggaaagcgggcagtgagcggtacccgataaaagcggcttcctgacaggaggccgttttgttttgcagcccacctcaacgcaattaatgtgagttagctcactcattaggcaccccaggctttacactttatgcttccggctcgtatgttgtgtggaattgtgagcggataacaattgaattaaggaggatataattatgaaatacctgctgccgaccgcagccgctggtctgctgctgctcgcggcctagccggccatggccgatatccagatgacccagtctccgtctaccctgtctgcttctgttggtgacaccatcaccatcacctgccgtgcttctcagtctatcgaaacctggctggcttggtaccagcagaaaccgggtaaagctccgaaactgctgatctacaaggcttctaccctgaaaaccggtgttccgtctcgtttctctggttctggttctggtaccgagttcaccctgaccatctctggtctgcagttcgacgacttcgctacctaccactgccagcactacgctggttactctgctaccttcggtcagggtacccgtgttgaaatcaaacgtaccgttgctgctccgtctgttttcatcttcccgccgtctgacgaacagctgaaatctggtaccgcttctgttgtttgcctgctgaacaacttctacccgcgtgaagctaaagttcagtggaaagttgacaacgctctgcagtctggtaactctcaggaatctgttaccgaacaggactctaaagactctacctactctctgtcttctaccctgaccctgtctaaagctgactacgaaaagcacaaagtttacgcttgcgaagttacccaccagggtctgagctctccggttaccaaatctttcaaccgtggtgaatgctaattaattaataaggaggatataattatgaaaaagacagctatcgcgattgcagtggcactggctggtttcgctaccgtagcctaggcggccgcagaagttcagctggttgaatctggtggtggtctggttaaagctggtggttctctgatcctgtcttgcggtgtttctaacttccgtatctctgctcacaccatgaactgggttcgtcgtgttccgggtggtggtctggaatgggttgcttctatctctacctcttctacctaccgtgactacgctgacgctgttaaaggtcgtttcaccgtttctcgtgacgacctggaagacttcgtttacctgcagatgcataaaatgcgtgttgaagacaccgctatctactactgcgctcgtaaaggttctgaccgtctgtctgacaacgacccgttcgacgcttggggtccgggtaccgttgttaccgtttctccggcgtcgaccaaaggtccgtctgttttcccgctggctccgtcttctaaatctacctctggtggtaccgctgctctgggttgcctggttaaagactacttcccggaaccggttaccgtttcttggaactctggtgctctgacctctggtgttcacaccttcccggctgttctgcagtcttctggtctgtactctctgtcttctgttgttaccgttccgtcttcttctctgggtacccagacctacatctgcaacgttaaccacaaaccgtctaacaccaaagttgacaagaaagttgaaccgaaatcttgcctgcgatcgcggccaggccggccgcaccatcaccatcaccatggcgcatacccgtacgacgttccggactacgcttctactagttaggagggtggtggctctgagggtggcggttctgagggtggcggctctgagggaggcggttccggtggtggctctggttccggtgattttgattatgaaaagatggcaaacgctaataagggggctatgaccgaaaatgccgatgaaaacgcgctacagtctgacgctaaaggcaaacttgattctgtcgctactgattacggtgctgctatcgatggtttcattggtgacgtttccggccttgctaatggtaatggtgctactggtgattttgctggctctaattcccaaatggctcaagtcggtgacggtgataattcacctttaatgaataatttccgtcaatatttaccttccctccctcaatcggttgaatgtcgcccttttgtctttggcgctggtaaaccatatgaattttctattgattgtgacaaaataaacttattccgtggtgtctttgcgtttcttttatatgttgccacctttatgtatgtattttctacgtttgctaacatactgcgtaataaggagtcttaagctagctaacgatcgcccttcccaacagttgcgcagcctgaatggcgaatgggacgcgccctgtagcggcgcattaagcgcggcgggtgtggtggttacgcgcagcgtgaccgctacacttgccagcgccctagcgcccgctcctttcgctttcttcccttcctttctcgccacgttcgccggctttccccgtcaagctctaaatcgggggctccctttagggttccgatttagtgctttacggcacctcgaccccaaaaaacttgattagggtgatggttcacgtagtgggccatcgccctgatagacggtttttcgccctttgacgttggagtccacgttctttaatagtggactcttgttccaaactggaacaacactcaaccctatctcggtctattcttttgatttataagggattttgccgatttcggcctattggttaaaaaatgagctgatttaacaaaaatttaacgcgaattttaacaaaatattaacgcttacaatttag

SEQ ID NO: 336 - DNA, 5879 bp, Artificial Sequence
  2G12 Fab DVV pCAL IT* Sac I
gtggcacttttcggggaaatgtgcgcggaacccctatttgtttatttttctaaatacattcaaatatgtatccgctcatgagacaataaccctgataaatgcttcaataatattgaaaaaggaagagtatgagtattcaacatttccgtgtcgcccttattcccttttttgcggcattttgccttcctgtttttgctcacccagaaacgctggtgaaagtaaaagatgctgaagatcagttgggtgcacgagtgggttacatcgaactggatctcaacagcggtaagatccttgagagttttcgccccgaagaacgttttccaatgatgagcacttttaaagttctgctatgtggcgcggtattatcccgtattgacgccgggcaagagcaactcggtcgccgcatacactattctcagaatgacttggttgagtactcaccagtcacagaaaagcatcttacggatggcatgacagtaagagaattatgcagtgctgccataaccatgagtgataacactgcggccaacttacttctgacaacgatcggaggaccgaaggagctaaccgcttttttgcacaacatgggggatcatgtaactcgccttgatcgttgggaaccggagctgaatgaagccataccaaacgacgagcgtgacaccacgatgcctgtagcaatggcaacaacgttgcgcaaactattaactggcgaactacttactctagcttcccggcaacaattaatagactggatggaggcggataaagttgcaggaccacttctgcgctcggcccttccggctggctggtttattgctgataaatctggagccggtgagcgtgggtctcgcggtatcattgcagcactggggccagatggtaagccctcccgtatcgtagttatctacacgacggggagtcaggcaactatggatgaacgaaatagacagatcgctgagataggtgcctcactgattaagcattggtaactgtcagaccaagtttactcatatatactttagattgatttaaaacttcatttttaatttaaaaggatctaggtgaagatcctttttgataatctcatgaccaaaatcccttaacgtgagttttcgttccactgagcgtcagaccccgtagaaaagatcaaaggatcttcttgagatcctttttttctgcgcgtaatctgctgcttgcaaacaaaaaaaccaccgctaccagcggtggtttgtttgccggatcaagagctaccaactctttttccgaaggtaactggcttcagcagagcgcagataccaaatactgtccttctagtgtagccgtagttaggccaccacttcaagaactctgtagcaccgcctacatacctcgctctgctaatcctgttaccagtggctgctgccagtggcgataagtcgtgtcttaccgggttggactcaagacgatagttaccggataaggcgcagcggtcgggctgaacggggggttcgtgcacacagcccagcttggagcgaacgacctacaccgaactgagatacctacagcgtgagctatgagaaagcgccacgcttcccgaagggagaaaggcggacaggtatccggtaagcggcagggtcggaacaggagagcgcacgagggagcttccagggggaaacgcctggtatctttatagtcctgtcgggtttcgccacctctgacttgagcgtcgatttttgtgatgctcgtcaggggggcggagcctatggaaaaacgccagcaacgcggcctttttacggttcctggccttttgctggccttttgctcacatgttctttcctgcgttatcccctgattctgtggataaccgtattaccgcctttgagtgagctgataccgctcgccgcagccgaacgaccgagcgcagcgagtcagtgagcgaggaagcgacaccatcgaatggcgcaaaacctttcgcggtatggcatgatagcgcccggaagagagtcaattcagggtggtgaatgtgaaaccagtaacgttatacgatgtcgcagagtatgccggtgtctcttatcagaccgtttcccgcgtggtgaaccaggccagccacgtttctgcgaaaacgcgggaaaaagtggaagcggcgatggcggagctgaattacattcccaaccgcgtggcacaacaactggcgggcaaacagtcgttgctgattggcgttgccacctccagtctggccctgcacgcgccgtcgcaaattgtcgcggcgattaaatctcgcgccgatcaactgggtgccagcgtggtggtgtcgatggtagaacgaagcggcgtcgaagcctgtaaagcggcggtgcacaatcttctcgcgcaacgcgtcagtgggctgatcattaactatccgctggatgaccaggatgccattgctgtggaagctgcctgcactaatgttccggcgttatttcttgatgtctctgaccagacacccatcaacagtattattttctcccatgaagacggtacgcgactgggcgtggagcatctggtcgcattgggtcaccagcaaatcgcgctgttagcgggcccattaagttctgtctcggcgcgtctgcgtctggctggctggcataaatatctcactcgcaatcaaattcagccgatagcggaacgggaaggcgactggagtgccatgtccggttttcaacaaaccatgcaaatgctgaatgagggcatcgttcccactgcgatgctggttgccaacgatcagatggcgctgggcgcaatgcgcgccattaccgagtccgggctgcgcgttggtgcggatatctcggtagtgggatacgacgataccgaagacagctcatgttatatcccgccgttaaccaccatcaaacaggattttcgcctgctggggcaaaccagcgtggaccgcttgctgcaactctctcagggccaggcggtgaagggcaatcagctgttgcccgtctcactggtgaaaagaaaaaccaccctggcgcccaatacgcaaaccgcctctccccgcgcgttggccgattcattaatgcagctggcacgacaggtttcccgactggaaagcgggcagtgagcggtacccgataaaagcggcttcctgacaggaggccgttttgttttgcagcccacctcaacgcaattaatgtgagttagctcactcattaggcaccccaggctttacactttatgcttccggctcgtatgttgtgtggaattgtgagcggataacaattgaattaaggaggatataattatgaaatacctgctgccgaccgcagccgctggtctgctgctgctcgcggcctagccggccatggccgatgttgttatgacccagtctccgtctaccctgtctgcttctgttggtgacaccatcaccatcacctgccgtgcttctcagtctatcgaaacctggctggcttggtaccagcagaaaccgggtaaagctccgaaactgctgatctacaaggcttctaccctgaaaaccggtgttccgtctcgtttctctggttctggttctggtaccgagttcaccctgaccatctctggtctgcagttcgacgacttcgctacctaccactgccagcactacgctggttactctgctaccttcggtcagggtacccgtgttgaaatcaaacgtaccgttgctgctccgtctgttttcatcttcccgccgtctgacgaacagctgaaatctggtaccgcttctgttgtttgcctgctgaacaacttctacccgcgtgaagctaaagttcagtggaaagttgacaacgctctgcagtctggtaactctcaggaatctgttaccgaacaggactctaaagactctacctactctctgtcttctaccctgaccctgtctaaagctgactacgaaaagcacaaagtttacgcttgcgaagttacccaccagggtctgagctctccggttaccaaatctttcaaccgtggtgaatgctaattaattaataaggaggatataattatgaaaaagacagctatcgcgattgcagtggcactggctggtttcgctaccgtagcctaggcggccgcagaagttcagctggttgaatctggtggtggtctggttaaagctggtggttctctgatcctgtcttgcggtgtttctaacttccgtatctctgctcacaccatgaactgggttcgtcgtgttccgggtggtggtctggaatgggttgcttctatctctacctcttctacctaccgtgactacgctgacgctgttaaaggtcgtttcaccgtttctcgtgacgacctggaagacttcgtttacctgcagatgcataaaatgcgtgttgaagacaccgctatctactactgcgctcgtaaaggttctgaccgtctgtctgacaacgacccgttcgacgcttggggtccgggtaccgttgttaccgtttctccggcgtcgaccaaaggtccgtctgttttcccgctggctccgtcttctaaatctacctctggtggtaccgctgctctgggttgcctggttaaagactacttcccggaaccggttaccgtttcttggaactctggtgctctgacctctggtgttcacaccttcccggctgttctgcagtcttctggtctgtactctctgtcttctgttgttaccgttccgtcttcttctctgggtacccagacctacatctgcaacgttaaccacaaaccgtctaacaccaaagttgacaagaaagttgaaccgaaatcttgcctgcgatcgcggccaggccggccgcaccatcaccatcaccatggcgcatacccgtacgacgttccggactacgcttctactagttaggagggtggtggctctgagggtggcggttctgagggtggcggctctgagggaggcggttccggtggtggctctggttccggtgattttgattatgaaaagatggcaaacgctaataagggggctatgaccgaaaatgccgatgaaaacgcgctacagtctgacgctaaaggcaaacttgattctgtcgctactgattacggtgctgctatcgatggtttcattggtgacgtttccggccttgctaatggtaatggtgctactggtgattttgctggctctaattcccaaatggctcaagtcggtgacggtgataattcacctttaatgaataatttccgtcaatatttaccttccctccctcaatcggttgaatgtcgcccttttgtctttggcgctggtaaaccatatgaattttctattgattgtgacaaaataaacttattccgtggtgtctttgcgtttcttttatatgttgccacctttatgtatgtattttctacgtttgctaacatactgcgtaataaggagtcttaagctagctaacgatcgcccttcccaacagttgcgcagcctgaatggcgaatgggacgcgccctgtagcggcgcattaagcgcggcgggtgtggtggttacgcgcagcgtgaccgctacacttgccagcgccctagcgcccgctcctttcgctttcttcccttcctttctcgccacgttcgccggctttccccgtcaagctctaaatcgggggctccctttagggttccgatttagtgctttacggcacctcgaccccaaaaaacttgattagggtgatggttcacgtagtgggccatcgccctgatagacggtttttcgccctttgacgttggagtccacgttctttaatagtggactcttgttccaaactggaacaacactcaaccctatctcggtctattcttttgatttataagggattttgccgatttcggcctattggttaaaaaatgagctgatttaacaaaaatttaacgcgaattttaacaaaatattaacgcttacaatttag

SEQ ID NO: 337 - DNA, 5879 bp, Artificial Sequence
  2G12 3Ala Fab DIQ pCAL IT* Sac I
gtggcacttttcggggaaatgtgcgcggaacccctatttgtttatttttctaaatacattcaaatatgtatccgctcatgagacaataaccctgataaatgcttcaataatattgaaaaaggaagagtatgagtattcaacatttccgtgtcgcccttattcccttttttgcggcattttgccttcctgtttttgctcacccagaaacgctggtgaaagtaaaagatgctgaagatcagttgggtgcacgagtgggttacatcgaactggatctcaacagcggtaagatccttgagagttttcgccccgaagaacgttttccaatgatgagcacttttaaagttctgctatgtggcgcggtattatcccgtattgacgccgggcaagagcaactcggtcgccgcatacactattctcagaatgacttggttgagtactcaccagtcacagaaaagcatcttacggatggcatgacagtaagagaattatgcagtgctgccataaccatgagtgataacactgcggccaacttacttctgacaacgatcggaggaccgaaggagctaaccgcttttttgcacaacatgggggatcatgtaactcgccttgatcgttgggaaccggagctgaatgaagccataccaaacgacgagcgtgacaccacgatgcctgtagcaatggcaacaacgttgcgcaaactattaactggcgaactacttactctagcttcccggcaacaattaatagactggatggaggcggataaagttgcaggaccacttctgcgctcggcccttccggctggctggtttattgctgataaatctggagccggtgagcgtgggtctcgcggtatcattgcagcactggggccagatggtaagccctcccgtatcgtagttatctacacgacggggagtcaggcaactatggatgaacgaaatagacagatcgctgagataggtgcctcactgattaagcattggtaactgtcagaccaagtttactcatatatactttagattgatttaaaacttcatttttaatttaaaaggatctaggtgaagatcctttttgataatctcatgaccaaaatcccttaacgtgagttttcgttccactgagcgtcagaccccgtagaaaagatcaaaggatcttcttgagatcctttttttctgcgcgtaatctgctgcttgcaaacaaaaaaaccaccgctaccagcggtggtttgtttgccggatcaagagctaccaactctttttccgaaggtaactggcttcagcagagcgcagataccaaatactgtccttctagtgtagccgtagttaggccaccacttcaagaactctgtagcaccgcctacatacctcgctctgctaatcctgttaccagtggctgctgccagtggcgataagtcgtgtcttaccgggttggactcaagacgatagttaccggataaggcgcagcggtcgggctgaacggggggttcgtgcacacagcccagcttggagcgaacgacctacaccgaactgagatacctacagcgtgagctatgagaaagcgccacgcttcccgaagggagaaaggcggacaggtatccggtaagcggcagggtcggaacaggagagcgcacgagggagcttccagggggaaacgcctggtatctttatagtcctgtcgggtttcgccacctctgacttgagcgtcgatttttgtgatgctcgtcaggggggcggagcctatggaaaaacgccagcaacgcggcctttttacggttcctggccttttgctggccttttgctcacatgttctttcctgcgttatcccctgattctgtggataaccgtattaccgcctttgagtgagctgataccgctcgccgcagccgaacgaccgagcgcagcgagtcagtgagcgaggaagcgacaccatcgaatggcgcaaaacctttcgcggtatggcatgatagcgcccggaagagagtcaattcagggtggtgaatgtgaaaccagtaacgttatacgatgtcgcagagtatgccggtgtctcttatcagaccgtttcccgcgtggtgaaccaggccagccacgtttctgcgaaaacgcgggaaaaagtggaagcggcgatggcggagctgaattacattcccaaccgcgtggcacaacaactggcgggcaaacagtcgttgctgattggcgttgccacctccagtctggccctgcacgcgccgtcgcaaattgtcgcggcgattaaatctcgcgccgatcaactgggtgccagcgtggtggtgtcgatggtagaacgaagcggcgtcgaagcctgtaaagcggcggtgcacaatcttctcgcgcaacgcgtcagtgggctgatcattaactatccgctggatgaccaggatgccattgctgtggaagctgcctgcactaatgttccggcgttatttcttgatgtctctgaccagacacccatcaacagtattattttctcccatgaagacggtacgcgactgggcgtggagcatctggtcgcattgggtcaccagcaaatcgcgctgttagcgggcccattaagttctgtctcggcgcgtctgcgtctggctggctggcataaatatctcactcgcaatcaaattcagccgatagcggaacgggaaggcgactggagtgccatgtccggttttcaacaaaccatgcaaatgctgaatgagggcatcgttcccactgcgatgctggttgccaacgatcagatggcgctgggcgcaatgcgcgccattaccgagtccgggctgcgcgttggtgcggatatctcggtagtgggatacgacgataccgaagacagctcatgttatatcccgccgttaaccaccatcaaacaggattttcgcctgctggggcaaaccagcgtggaccgcttgctgcaactctctcagggccaggcggtgaagggcaatcagctgttgcccgtctcactggtgaaaagaaaaaccaccctggcgcccaatacgcaaaccgcctctccccgcgcgttggccgattcattaatgcagctggcacgacaggtttcccgactggaaagcgggcagtgagcggtacccgataaaagcggcttcctgacaggaggccgttttgttttgcagcccacctcaacgcaattaatgtgagttagctcactcattaggcaccccaggctttacactttatgcttccggctcgtatgttgtgtggaattgtgagcggataacaattgaattaaggaggatataattatgaaatacctgctgccgaccgcagccgctggtctgctgctgctcgcggcctagccggccatggccgatatccagatgacccagtctccgtctaccctgtctgcttctgttggtgacaccatcaccatcacctgccgtgcttctcagtctatcgaaacctggctggcttggtaccagcagaaaccgggtaaagctccgaaactgctgatctacaaggcttctaccctgaaaaccggtgttccgtctcgtttctctggttctggttctggtaccgagttcaccctgaccatctctggtctgcagttcgacgacttcgctacctaccactgccagcactacgctggttactctgctaccttcggtcagggtacccgtgttgaaatcaaacgtaccgttgctgctccgtctgttttcatcttcccgccgtctgacgaacagctgaaatctggtaccgcttctgttgtttgcctgctgaacaacttctacccgcgtgaagctaaagttcagtggaaagttgacaacgctctgcagtctggtaactctcaggaatctgttaccgaacaggactctaaagactctacctactctctgtcttctaccctgaccctgtctaaagctgactacgaaaagcacaaagtttacgcttgcgaagttacccaccagggtctgagctctccggttaccaaatctttcaaccgtggtgaatgctaattaattaataaggaggatataattatgaaaaagacagctatcgcgattgcagtggcactggctggtttcgctaccgtagcctaggcggccgcagaagttcagctggttgaatctggtggtggtctggttaaagctggtggttctctgatcctgtcttgcggtgtttctaacttccgtatctctgctcacaccatgaactgggttcgtcgtgttccgggtggtggtctggaatgggttgcttctatctctacctcttctacctaccgtgactacgctgacgctgttaaaggtcgtttcaccgtttctcgtgacgacctggaagacttcgtttacctgcagatgcataaaatgcgtgttgaagacaccgctatctactactgcgctcgtaaaggttctgaccgtgcggcggacgcggacccgttcgacgcttggggtccgggtaccgttgttaccgtttctccggcgtcgaccaaaggtccgtctgttttcccgctggctccgtcttctaaatctacctctggtggtaccgctgctctgggttgcctggttaaagactacttcccggaaccggttaccgtttcttggaactctggtgctctgacctctggtgttcacaccttcccggctgttctgcagtcttctggtctgtactctctgtcttctgttgttaccgttccgtcttcttctctgggtacccagacctacatctgcaacgttaaccacaaaccgtctaacaccaaagttgacaagaaagttgaaccgaaatcttgcctgcgatcgcggccaggccggccgcaccatcaccatcaccatggcgcatacccgtacgacgttccggactacgcttctactagttaggagggtggtggctctgagggtggcggttctgagggtggcggctctgagggaggcggttccggtggtggctctggttccggtgattttgattatgaaaagatggcaaacgctaataagggggctatgaccgaaaatgccgatgaaaacgcgctacagtctgacgctaaaggcaaacttgattctgtcgctactgattacggtgctgctatcgatggtttcattggtgacgtttccggccttgctaatggtaatggtgctactggtgattttgctggctctaattcccaaatggctcaagtcggtgacggtgataattcacctttaatgaataatttccgtcaatatttaccttccctccctcaatcggttgaatgtcgcccttttgtctttggcgctggtaaaccatatgaattttctattgattgtgacaaaataaacttattccgtggtgtctttgcgtttcttttatatgttgccacctttatgtatgtattttctacgtttgctaacatactgcgtaataaggagtcttaagctagctaacgatcgcccttcccaacagttgcgcagcctgaatggcgaatgggacgcgccctgtagcggcgcattaagcgcggcgggtgtggtggttacgcgcagcgtgaccgctacacttgccagcgccctagcgcccgctcctttcgctttcttcccttcctttctcgccacgttcgccggctttccccgtcaagctctaaatcgggggctccctttagggttccgatttagtgctttacggcacctcgaccccaaaaaacttgattagggtgatggttcacgtagtgggccatcgccctgatagacggtttttcgccctttgacgttggagtccacgttctttaatagtggactcttgttccaaactggaacaacactcaaccctatctcggtctattcttttgatttataagggattttgccgatttcggcctattggttaaaaaatgagctgatttaacaaaaatttaacgcgaattttaacaaaatattaacgcttacaatttag

SEQ ID NO: 338 - DNA, 5879 bp, Artificial Sequence
  2G12 3Ala Fab DVV pCAL IT* SacI
gtggcacttttcggggaaatgtgcgcggaacccctatttgtttatttttctaaatacattcaaatatgtatccgctcatgagacaataaccctgataaatgcttcaataatattgaaaaaggaagagtatgagtattcaacatttccgtgtcgcccttattcccttttttgcggcattttgccttcctgtttttgctcacccagaaacgctggtgaaagtaaaagatgctgaagatcagttgggtgcacgagtgggttacatcgaactggatctcaacagcggtaagatccttgagagttttcgccccgaagaacgttttccaatgatgagcacttttaaagttctgctatgtggcgcggtattatcccgtattgacgccgggcaagagcaactcggtcgccgcatacactattctcagaatgacttggttgagtactcaccagtcacagaaaagcatcttacggatggcatgacagtaagagaattatgcagtgctgccataaccatgagtgataacactgcggccaacttacttctgacaacgatcggaggaccgaaggagctaaccgcttttttgcacaacatgggggatcatgtaactcgccttgatcgttgggaaccggagctgaatgaagccataccaaacgacgagcgtgacaccacgatgcctgtagcaatggcaacaacgttgcgcaaactattaactggcgaactacttactctagcttcccggcaacaattaatagactggatggaggcggataaagttgcaggaccacttctgcgctcggcccttccggctggctggtttattgctgataaatctggagccggtgagcgtgggtctcgcggtatcattgcagcactggggccagatggtaagccctcccgtatcgtagttatctacacgacggggagtcaggcaactatggatgaacgaaatagacagatcgctgagataggtgcctcactgattaagcattggtaactgtcagaccaagtttactcatatatactttagattgatttaaaacttcatttttaatttaaaaggatctaggtgaagatcctttttgataatctcatgaccaaaatcccttaacgtgagttttcgttccactgagcgtcagaccccgtagaaaagatcaaaggatcttcttgagatcctttttttctgcgcgtaatctgctgcttgcaaacaaaaaaaccaccgctaccagcggtggtttgtttgccggatcaagagctaccaactctttttccgaaggtaactggcttcagcagagcgcagataccaaatactgtccttctagtgtagccgtagttaggccaccacttcaagaactctgtagcaccgcctacatacctcgctctgctaatcctgttaccagtggctgctgccagtggcgataagtcgtgtcttaccgggttggactcaagacgatagttaccggataaggcgcagcggtcgggctgaacggggggttcgtgcacacagcccagcttggagcgaacgacctacaccgaactgagatacctacagcgtgagctatgagaaagcgccacgcttcccgaagggagaaaggcggacaggtatccggtaagcggcagggtcggaacaggagagcgcacgagggagcttccagggggaaacgcctggtatctttatagtcctgtcgggtttcgccacctctgacttgagcgtcgatttttgtgatgctcgtcaggggggcggagcctatggaaaaacgccagcaacgcggcctttttacggttcctggccttttgctggccttttgctcacatgttctttcctgcgttatcccctgattctgtggataaccgtattaccgcctttgagtgagctgataccgctcgccgcagccgaacgaccgagcgcagcgagtcagtgagcgaggaagcgacaccatcgaatggcgcaaaacctttcgcggtatggcatgatagcgcccggaagagagtcaattcagggtggtgaatgtgaaaccagtaacgttatacgatgtcgcagagtatgccggtgtctcttatcagaccgtttcccgcgtggtgaaccaggccagccacgtttctgcgaaaacgcgggaaaaagtggaagcggcgatggcggagctgaattacattcccaaccgcgtggcacaacaactggcgggcaaacagtcgttgctgattggcgttgccacctccagtctggccctgcacgcgccgtcgcaaattgtcgcggcgattaaatctcgcgccgatcaactgggtgccagcgtggtggtgtcgatggtagaacgaagcggcgtcgaagcctgtaaagcggcggtgcacaatcttctcgcgcaacgcgtcagtgggctgatcattaactatccgctggatgaccaggatgccattgctgtggaagctgcctgcactaatgttccggcgttatttcttgatgtctctgaccagacacccatcaacagtattattttctcccatgaagacggtacgcgactgggcgtggagcatctggtcgcattgggtcaccagcaaatcgcgctgttagcgggcccattaagttctgtctcggcgcgtctgcgtctggctggctggcataaatatctcactcgcaatcaaattcagccgatagcggaacgggaaggcgactggagtgccatgtccggttttcaacaaaccatgcaaatgctgaatgagggcatcgttcccactgcgatgctggttgccaacgatcagatggcgctgggcgcaatgcgcgccattaccgagtccgggctgcgcgttggtgcggatatctcggtagtgggatacgacgataccgaagacagctcatgttatatcccgccgttaaccaccatcaaacaggattttcgcctgctggggcaaaccagcgtggaccgcttgctgcaactctctcagggccaggcggtgaagggcaatcagctgttgcccgtctcactggtgaaaagaaaaaccaccctggcgcccaatacgcaaaccgcctctccccgcgcgttggccgattcattaatgcagctggcacgacaggtttcccgactggaaagcgggcagtgagcggtacccgataaaagcggcttcctgacaggaggccgttttgttttgcagcccacctcaacgcaattaatgtgagttagctcactcattaggcaccccaggctttacactttatgcttccggctcgtatgttgtgtggaattgtgagcggataacaattgaattaaggaggatataattatgaaatacctgctgccgaccgcagccgctggtctgctgctgctcgcggcctagccggccatggccgatgttgttatgacccagtctccgtctaccctgtctgcttctgttggtgacaccatcaccatcacctgccgtgcttctcagtctatcgaaacctggctggcttggtaccagcagaaaccgggtaaagctccgaaactgctgatctacaaggcttctaccctgaaaaccggtgttccgtctcgtttctctggttctggttctggtaccgagttcaccctgaccatctctggtctgcagttcgacgacttcgctacctaccactgccagcactacgctggttactctgctaccttcggtcagggtacccgtgttgaaatcaaacgtaccgttgctgctccgtctgttttcatcttcccgccgtctgacgaacagctgaaatctggtaccgcttctgttgtttgcctgctgaacaacttctacccgcgtgaagctaaagttcagtggaaagttgacaacgctctgcagtctggtaactctcaggaatctgttaccgaacaggactctaaagactctacctactctctgtcttctaccctgaccctgtctaaagctgactacgaaaagcacaaagtttacgcttgcgaagttacccaccagggtctgagctctccggttaccaaatctttcaaccgtggtgaatgctaattaattaataaggaggatataattatgaaaaagacagctatcgcgattgcagtggcactggctggtttcgctaccgtagcctaggcggccgcagaagttcagctggttgaatctggtggtggtctggttaaagctggtggttctctgatcctgtcttgcggtgtttctaacttccgtatctctgctcacaccatgaactgggttcgtcgtgttccgggtggtggtctggaatgggttgcttctatctctacctcttctacctaccgtgactacgctgacgctgttaaaggtcgtttcaccgtttctcgtgacgacctggaagacttcgtttacctgcagatgcataaaatgcgtgttgaagacaccgctatctactactgcgctcgtaaaggttctgaccgtgcggcggacgcggacccgttcgacgcttggggtccgggtaccgttgttaccgtttctccggcgtcgaccaaaggtccgtctgttttcccgctggctccgtcttctaaatctacctctggtggtaccgctgctctgggttgcctggttaaagactacttcccggaaccggttaccgtttcttggaactctggtgctctgacctctggtgttcacaccttcccggctgttctgcagtcttctggtctgtactctctgtcttctgttgttaccgttccgtcttcttctctgggtacccagacctacatctgcaacgttaaccacaaaccgtctaacaccaaagttgacaagaaagttgaaccgaaatcttgcctgcgatcgcggccaggccggccgcaccatcaccatcaccatggcgcatacccgtacgacgttccggactacgcttctactagttaggagggtggtggctctgagggtggcggttctgagggtggcggctctgagggaggcggttccggtggtggctctggttccggtgattttgattatgaaaagatggcaaacgctaataagggggctatgaccgaaaatgccgatgaaaacgcgctacagtctgacgctaaaggcaaacttgattctgtcgctactgattacggtgctgctatcgatggtttcattggtgacgtttccggccttgctaatggtaatggtgctactggtgattttgctggctctaattcccaaatggctcaagtcggtgacggtgataattcacctttaatgaataatttccgtcaatatttaccttccctccctcaatcggttgaatgtcgcccttttgtctttggcgctggtaaaccatatgaattttctattgattgtgacaaaataaacttattccgtggtgtctttgcgtttcttttatatgttgccacctttatgtatgtattttctacgtttgctaacatactgcgtaataaggagtcttaagctagctaacgatcgcccttcccaacagttgcgcagcctgaatggcgaatgggacgcgccctgtagcggcgcattaagcgcggcgggtgtggtggttacgcgcagcgtgaccgctacacttgccagcgccctagcgcccgctcctttcgctttcttcccttcctttctcgccacgttcgccggctttccccgtcaagctctaaatcgggggctccctttagggttccgatttagtgctttacggcacctcgaccccaaaaaacttgattagggtgatggttcacgtagtgggccatcgccctgatagacggtttttcgccctttgacgttggagtccacgttctttaatagtggactcttgttccaaactggaacaacactcaaccctatctcggtctattcttttgatttataagggattttgccgatttcggcctattggttaaaaaatgagctgatttaacaaaaatttaacgcgaattttaacaaaatattaacgcttacaatttag

SEQ ID NO: 339 - DNA, 25 bp, Artificial Sequence
  YASA-R
gtgctggcagtggtaggtagcgaag

SEQ ID NO: 340 - DNA, 24 bp, Artificial Sequence
  QHYA-R
gcagtggtaggtagcgaagtcgtc

SEQ ID NO: 341 - DNA, 48 bp, Artificial Sequence; identical to SEQ ID NO: 19
  2G12LCR3

SEQ ID NO: 342 - DNA, 68 bp, Artificial Sequence
  LCDR3-YASA 5'
  variation 26, 27, 29, 30, 38, 39, 41, 42: n = a, c, g or t
cttcgctacctaccactgccagcacnnknnkggttacnnknnkaccttcggtcagggtacccgtgttg

SEQ ID NO: 343 - DNA, 70 bp, Artificial Sequence
  LCDR3-QHYA 5
  variation 25, 26, 28, 29, 31, 32, 34, 35: n = a, c, g or t
gacgacttcgctacctaccactgcnnknnknnknnkggttactctgctaccttcggtcagggtacccgtg

SEQ ID NO: 344 - DNA, 25 bp, Artificial Sequence
  KGDD-R
acgagcgcagtagtagatagcggtg

SEQ ID NO: 345 - DNA, 81 bp, Artificial Sequence
  HCDR3-KGDD 5'
  variation 26, 27, 29, 30, 47, 48, 53, 54: n = a, c, g or t
caccgctatctactactgcgctcgtnnknnktctgaccgtctgtctnnkaacnnkccgttcgacgcttggggtccgggtac

SEQ ID NO: 346 - DNA, 42 bp, Artificial Sequence
  2G12HCmutR2
ggcgctgtcggtaggctcttccgtcgacgccggagaaacggt

SEQ ID NO: 347 - DNA, 43 bp, Artificial Sequence
  2G12HCmutF1
ggcgctgtcggtaggctcttccgcggccgcagaagttcagctg

SEQ ID NO: 348 - DNA, 22 bp, Artificial Sequence
  CALX22
ggcgctgtcggtaggctcttcc

SEQ ID NO: 349 - DNA, 45 bp, Artificial Sequence
  F1
gccgctgtgccatcgctcagtaacgcggccgcagaagttcagctg

SEQ ID NO: 350 - DNA, 39 bp, Artificial Sequence
  R1
ggcggcgctcttcagttagaaacaccgcaagacaggatc

SEQ ID NO: 351 - DNA, 35 bp, Artificial Sequence
  F2
ggcggcgctcttctcgtgttccgggtggtggtctg

SEQ ID NO: 352 - DNA, 44 bp, Artificial Sequence
  R3
gccgctgtgccatcgctcagtaacgtcgacgccggagaaacggt

SEQ ID NO: 353 - DNA, 39 bp, Artificial Sequence
  H1F
  variation 19, 20, 22, 23: n = a, c, g or t
aacttccgtatctctgctnntnnkatgaactgggttcgt

SEQ ID NO: 354 - DNA, 39 bp, Artificial Sequence
  H1R
  variation 20, 21, 23, 24: n = a, c, g or t
acgacgaacccagttcatmnnannagcagagatacggaa

SEQ ID NO: 355 - DNA, 37 bp, Artificial Sequence
  R2
ggcggcgctcttcagtagatagcggtgtcttcaacac

SEQ ID NO: 356 - DNA, 34 bp, Artificial Sequence
  F3
ggcggcgctcttcgggtccgggtaccgttgttac

SEQ ID NO: 357 - DNA, 60 bp, Artificial Sequence
  H3F
  variation 19, 20, 31, 32, 34, 35, 40, 41, 43, 44: n = a, c, g or t
tactactgcgctcgtaaannktctgaccgtnntnnkgacnnknnkccgttcgacgcttgg

SEQ ID NO: 358 - DNA, 60 bp, Artificial Sequence
  H3R
  variation 20, 21, 23, 24, 29, 30, 32, 33, 44, 45: n = a, c, g or t
accccaagcgtcgaacggmnnmnngtcmnnannacggtcagamnntttacgagcgcagta

SEQ ID NO: 359 - DNA, 23 bp, Artificial Sequence
  2G12HCmutR1
tttacgagcgcagtagtagatag

SEQ ID NO: 360 - DNA, 71 bp, Artificial Sequence
  2G12HCmutF2
  variation 26, 27, 38, 39, 41, 42, 47, 48, 50, 51: n = a, c, g or t
cgctatctactactgcgctcgtaaannktctgaccgtnntnnkgacnnknnkccgttcgacgcttggggtc

SEQ ID NO: 361 - DNA, 21 bp, Artificial Sequence
  SeqpCALMfeI-F
gttagctcactcattaggcac

SEQ ID NO: 362 - DNA, 8 bp, Artificial Sequence
  Not I restriction site
gcggccgc

SEQ ID NO: 363 - DNA, 6 bp, Artificial Sequence
  Sal I restriction site
gtcgac

SEQ ID NO: 364 - DNA, 54 bp, Artificial Sequence
  2G12NLCF2
  variation 22, 23, 25, 26, 31, 32, 34, 35, 37, 38: n = a, c, g or t
gctacctaccactgccagcacnnknnkggtnnknnknnkaccttcggtcagggt

SEQ ID NO: 365 - DNA, 54 bp, Artificial Sequence
  2G12NLCR2
  variation 20, 21, 23, 24, 26, 27, 32, 33, 35, 36: n = a, c, g or t
ggtaccctgaccgaaggtmnnmnnmnnaccmnnmnngtgctggcagtggtaggt

SEQ ID NO: 366 - DNA, 35 bp, Artificial Sequence; identical to SEQ ID NO: 203
  2G12LCF3

SEQ ID NO: 367 - DNA, 48 bp, Artificial Sequence; identical to SEQ ID NO: 19
  2G12LCR3

SEQ ID NO: 368 - DNA, 66 bp, Artificial Sequence
  SapIAla-R
cgaaggtcgcggccgcacccgcggcgtgctggcaggctcttctagcgaagtcgtcgaactgcagac

SEQ ID NO: 369 - DNA, 66 bp, Artificial Sequence
  SapIAla-F
ctgccagcacgccgcgggtgcggccgcgaccttcggctcttctacccgtgttgaaatcaaacgtac

SEQ ID NO: 370 - DNA, 60 bp, Artificial Sequence
  2G12LCmutR1
  variation 24, 25, 27, 28, 30, 31, 36, 37, 39, 40: n = a, c, g or t
cacgggtaccctgaccgaaggtmnnmnnmnnaccmnnmnnatgctggcagtggtaggtag

SEQ ID NO: 371 - DNA, 18 bp, Artificial Sequence
  2G12LCmutF1
accttcggtcagggtacc

SEQ ID NO: 372 - protein, 19 aa, Artificial Sequence
  2G12 3Ala LC
ATYHCQHAAGAAATFGQGT

SEQ ID NO: 373 - protein, 19 aa, Artificial Sequence
  2G12 3Ala LC SapI
ARGACQHAAGAAATFGSST

SEQ ID NO: 374 - DNA, 57 bp, Artificial Sequence
  Forward Primer
gctagaagagcctgccagcacgccgcgggtgcggccgcgaccttcggctcttctacc

SEQ ID NO: 375 - DNA, 57 bp, Artificial Sequence
  Reverse Primer
cgatcttctcggacggtcgtgcggcgcccacgccggcgctggaagccgagaagatgg

SEQ ID NO: 376 - DNA, 20 bp, Artificial Sequence
  SeqpCALLC-F
ggatataattatgaaatacc

SEQ ID NO: 377 - DNA, 21 bp, Artificial Sequence
  SeqpCALMfeI-F
gttagctcactcattaggcac

SEQ ID NO: 378 - DNA, 47 bp, Artificial Sequence
  DXLCF1
gccgctgtgccatcgctcagtaacggataacaattgaattaaggagg

SEQ ID NO: 379 - DNA, 31 bp, Artificial Sequence
  DXL3-R
gcagtggtaggtcgcgaagtcgtcgaactgc

SEQ ID NO: 380 - DNA, 71 bp, Artificial Sequence
  DXL3-F
  variation 38, 41, 42, 48: n = a, c, g or t
cgacgacttcgcgacctaccactgckvybvbbvbdvynvhnnbbvbbnbaccttcggtcagggtacccgtg

SEQ ID NO: 381 - DNA, 47 bp, Artificial Sequence
  DXLCR2
gccgctgtgccatcgctcagtaacgagctcagaccctggtgggtaac

SEQ ID NO: 382 - DNA, 34 bp, Artificial Sequence
  DXH1-R
gctgatacggaagttgctaacaccgcaagacagg

SEQ ID NO: 383 - DNA, 63 bp, Artificial Sequence
  DXH1-F
cttgcggtgttagcaacttccgtatcagcdmyymydvyatgwmytgggttcgtcgtgttccgg

SEQ ID NO: 384 - DNA, 27 bp, Artificial Sequence
  DXH3-R
acgcgcgcagtagtagatagcggtgtc

SEQ ID NO: 385 - DNA, 78 bp, Artificial Sequence
  DXH3-F
  variation 29, 31, 32, 34, 35, 37, 38, 40, 41, 43, 44, 47, 49, 50, 52,53, 56, 59: n = a, g, c or t
gacaccgctatctactactgcgcgcgtdnhnnbnnbnnbnnynnbdnynnbnnbdnbbnbttcgacgcttggggtccg

SEQ ID NO: 386 - DNA, 24 bp, Artificial Sequence
  DXH3ext-F
gacaccgctatctactactgcgcg

SEQ ID NO: 387 - DNA, 48 bp, Artificial Sequence
  Nsi-R
gccgctgtgccatcgctcagtaacatgcatctgcaggtaaacgaagtc

SEQ ID NO: 388 - DNA, 48 bp, Artificial Sequence
  Nsi-F
gccgctgtgccatcgctcagtaacatgcataaaatgcgtgttgaagac

SEQ ID NO: 389 - DNA, 20 bp, Artificial Sequence
  H3(-)(H3all)
ccgggccccaagcgtcgaac

SEQ ID NO: 390 - DNA, 62 bp, Artificial Sequence
  H3(+)(L3+H3)
ctgcgcgcgtaaakrttmtkmthrtyhttmtkmtwmtkmtccgttcgacgcttggggcccgg

SEQ ID NO: 391 - DNA, 62 bp, Artificial Sequence
  H3(+)(H1+H3)
ctgcgcgcgtrrgkrttmtkmthrtyhttmtkmtwmtkmtccgttcgacgcttggggcccgg

SEQ ID NO: 392 - DNA, 62 bp, Artificial Sequence
  H3(+)(L3+H1+H3)
ctgcgcgcgtaaaggttmtkmthrtyhttctkmtwmtkmtccgttcgacgcttggggcccgg

SEQ ID NO: 393 - DNA, 20 bp, Artificial Sequence
  L3(-)(L3all)
caacgcgtgtaccctgaccg

SEQ ID NO: 394 - DNA, 20 bp, Artificial Sequence
  H3(-)(H3all)
ccgggccccaagcgtcgaac

SEQ ID NO: 395 - DNA, 18 bp, Artificial Sequence
  H1(-)(H1all)
cccggaacgcgtctaacc

SEQ ID NO: 396 - DNA, 41 bp, Artificial Sequence; identical to SEQ ID NO: 13
  2G12LCF

SEQ ID NO: 397 - DNA, 27 bp, Artificial Sequence
  DXmiL3-R
ctggcagtggtacgtagcgaagtcgtc

SEQ ID NO: 398 - DNA, 48 bp, Artificial Sequence; identical to SEQ ID NO: 19
  2G12LCR

SEQ ID NO: 399 - DNA, 64 bp, Artificial Sequence
  CDRL3 DX Minimalist Library
gctacgtaccactgccagcastmckmcrrctmcymcgctaccttcggtcagggtacacgcgttg

SEQ ID NO: 400 - DNA, 48 bp, Artificial Sequence
  CDRH1 DX Minimalist Library
ctttcgaatctctkctyacwmcatgwmctgggttagacgcgttccggg

SEQ ID NO: 401 - DNA, 62 bp, Artificial Sequence
  CDRH3 DX Minimalist Library
ctgcgcgcgtrrsvgctmtkmcvgcyhctmtkmcwmckmcccgttcgacgcttggggcccgg

SEQ ID NO: 402 - DNA, 38 bp, Artificial Sequence
  L3 snaB1 forward
gttcgacgacttcgctacgtaccactgccagcactacg

SEQ ID NO: 403 - DNA, 38 bp, Artificial Sequence
  L3 snaB1 reverse
cgtagtgctggcagtggtacgtagcgaagtcgtcgaac

SEQ ID NO: 404 - DNA, 36 bp, Artificial Sequence
  L3 mluI forward
cttcggtcagggtacacgcgttgaaatcaaacgtac

SEQ ID NO: 405 - DNA, 36 bp, Artificial Sequence
  L3 mluI reverse
gtacgtttgatttcaacgcgtgtaccctgaccgaag

SEQ ID NO: 406 - DNA, 35 bp, Artificial Sequence
  H1 bstbi forward
gcggtgtttctaactttcgaatctctgctcacacc

SEQ ID NO: 407 - DNA, 35 bp, Artificial Sequence
  H1 bstbi reverse
ggtgtgagcagagattcgaaagttagaaacaccgc

SEQ ID NO: 408 - DNA, 39 bp, Artificial Sequence
  H1 mluI forward
ccatgaactgggttagacgcgttccgggtggtggtctgg

SEQ ID NO: 409 - DNA, 39 bp, Artificial Sequence
  H1 mluI reverse
ccagaccaccacccggaacgcgtctaacccagttcatgg

SEQ ID NO: 410 - DNA, 37 bp, Artificial Sequence
  H3 BssHII forward
ccgctatctactactgcgcgcgtaaaggttctgaccg

SEQ ID NO: 411 - DNA, 37 bp, Artificial Sequence
  H3 BssHII reverse
cggtcagaacctttacgcgcgcagtagtagatagcgg

SEQ ID NO: 412 - DNA, 38 bp, Artificial Sequence
  H3 apaI forward
cccgttcgacgcttggggcccgggtaccgttgttaccg

SEQ ID NO: 413 - DNA, 38 bp, Artificial Sequence
  H3 apaI reverse
cggtaacaacggtacccgggccccaagcgtcgaacggg

SEQ ID NO: 414 - DNA, 5882 bp, Artificial Sequence
  L3 vector
gtggcacttttcggggaaatgtgcgcggaacccctatttgtttatttttctaaatacattcaaatatgtatccgctcatgagacaataaccctgataaatgcttcaataatattgaaaaaggaagagtatgagtattcaacatttccgtgtcgcccttattcccttttttgcggcattttgccttcctgtttttgctcacccagaaacgctggtgaaagtaaaagatgctgaagatcagttgggtgcacgagtgggttacatcgaactggatctcaacagcggtaagatccttgagagttttcgccccgaagaacgttttccaatgatgagcacttttaaagttctgctatgtggcgcggtattatcccgtattgacgccgggcaagagcaactcggtcgccgcatacactattctcagaatgacttggttgagtactcaccagtcacagaaaagcatcttacggatggcatgacagtaagagaattatgcagtgctgccataaccatgagtgataacactgcggccaacttacttctgacaacgatcggaggaccgaaggagctaaccgcttttttgcacaacatgggggatcatgtaactcgccttgatcgttgggaaccggagctgaatgaagccataccaaacgacgagcgtgacaccacgatgcctgtagcaatggcaacaacgttgcgcaaactattaactggcgaactacttactctagcttcccggcaacaattaatagactggatggaggcggataaagttgcaggaccacttctgcgctcggcccttccggctggctggtttattgctgataaatctggagccggtgagcgtgggtctcgcggtatcattgcagcactggggccagatggtaagccctcccgtatcgtagttatctacacgacggggagtcaggcaactatggatgaacgaaatagacagatcgctgagataggtgcctcactgattaagcattggtaactgtcagaccaagtttactcatatatactttagattgatttaaaacttcatttttaatttaaaaggatctaggtgaagatcctttttgataatctcatgaccaaaatcccttaacgtgagttttcgttccactgagcgtcagaccccgtagaaaagatcaaaggatcttcttgagatcctttttttctgcgcgtaatctgctgcttgcaaacaaaaaaaccaccgctaccagcggtggtttgtttgccggatcaagagctaccaactctttttccgaaggtaactggcttcagcagagcgcagataccaaatactgtccttctagtgtagccgtagttaggccaccacttcaagaactctgtagcaccgcctacatacctcgctctgctaatcctgttaccagtggctgctgccagtggcgataagtcgtgtcttaccgggttggactcaagacgatagttaccggataaggcgcagcggtcgggctgaacggggggttcgtgcacacagcccagcttggagcgaacgacctacaccgaactgagatacctacagcgtgagctatgagaaagcgccacgcttcccgaagggagaaaggcggacaggtatccggtaagcggcagggtcggaacaggagagcgcacgagggagcttccagggggaaacgcctggtatctttatagtcctgtcgggtttcgccacctctgacttgagcgtcgatttttgtgatgctcgtcaggggggcggagcctatggaaaaacgccagcaacgcggcctttttacggttcctggccttttgctggccttttgctcacatgttctttcctgcgttatcccctgattctgtggataaccgtattaccgcctttgagtgagctgataccgctcgccgcagccgaacgaccgagcgcagcgagtcagtgagcgaggaagcgacaccatcgaatggcgcaaaacctttcgcggtatggcatgatagcgcccggaagagagtcaattcagggtggtgaatgtgaaaccagtaacgttatacgatgtcgcagagtatgccggtgtctcttatcagaccgtttcccgcgtggtgaaccaggccagccacgtttctgcgaaaacgcgggaaaaagtggaagcggcgatggcggagctgaattacattcccaaccgcgtggcacaacaactggcgggcaaacagtcgttgctgattggcgttgccacctccagtctggccctgcacgcgccgtcgcaaattgtcgcggcgattaaatctcgcgccgatcaactgggtgccagcgtggtggtgtcgatggtagaacgaagcggcgtcgaagcctgtaaagcggcggtgcacaatcttctcgcgcaacgtgtcagtgggctgatcattaactatccgctggatgaccaggatgccattgctgtggaagctgcctgcactaatgttccggcgttatttcttgatgtctctgaccagacacccatcaacagtattattttctcccatgaagacggtacgcgactgggcgtggagcatctggtcgcattgggtcaccagcaaatcgcgctgttagcgggtccattaagttctgtctcggcgcgtctgcgtctggctggctggcataaatatctcactcgcaatcaaattcagccgatagcggaacgggaaggcgactggagtgccatgtccggttttcaacaaaccatgcaaatgctgaatgagggcatcgttcccactgcgatgctggttgccaacgatcagatggcgctgggcgcaatgcgtgccattaccgagtccgggctgcgcgttggtgcggatatctcggtagtgggatacgacgataccgaagacagctcatgttatatcccgccgttaaccaccatcaaacaggattttcgcctgctggggcaaaccagcgtggaccgcttgctgcaactctctcagggccaggcggtgaagggcaatcagctgttgcccgtctcactggtgaaaagaaaaaccaccctggcgcccaatacgcaaaccgcctctccccgcgcgttggccgattcattaatgcagctggcacgacaggtttcccgactggaaagcgggcagtgagcggtacccgataaaagcggcttcctgacaggaggccgttttgttttgcagcccacctcaacgcaattaatgtgagttagctcactcattaggcaccccaggctttacactttatgcttccggctcgtatgttgtgtggaattgtgagcggataacaattgaattaaggaggatataattatgaaatacctgctgccgaccgcagccgctggtctgctgctgctcgcggcctagccggccatggccgccggtgttgttatgacccagtctccgtctaccctgtctgcttctgttggtgacaccatcaccatcacctgccgtgcttctcagtctatcgaaacctggctggcttggtaccagcagaaaccgggtaaagctccgaaactgctgatctacaaggcttctaccctgaaaaccggtgttccgtctcgtttctctggttctggttctggtaccgagttcaccctgaccatctctggtctgcagttcgacgacttcgctacgtaccactgccagcactacgctggttactctgctaccttcggtcagggtacacgcgttgaaatcaaacgtaccgttgctgctccgtctgttttcatcttcccgccgtctgacgaacagctgaaatctggtaccgcttctgttgtttgcctgctgaacaacttctacccgcgtgaagctaaagttcagtggaaagttgacaacgctctgcagtctggtaactctcaggaatctgttaccgaacaggactctaaagactctacctactctctgtcttctaccctgaccctgtctaaagctgactacgaaaagcacaaagtttacgcttgcgaagttacccaccagggtctgtcttctccggttaccaaatctttcaaccgtggtgaatgctaattaattaataaggaggatataattatgaaaaagacagctatcgcgattgcagtggcactggctggtttcgctaccgtagcctaggcggccgcagaagttcagctggttgaatctggtggtggtctggttaaagctggtggttctctgatcctgtcttgcggtgtttctaacttccgtatctctgctcacaccatgaactgggttcgtcgtgttccgggtggtggtctggaatgggttgcttctatctctacctcttctacctaccgtgactacgctgacgctgttaaaggtcgtttcaccgtttctcgtgacgacctggaagacttcgtttacctgcagatgcataaaatgcgtgttgaagacaccgctatctactactgcgctcgtaaaggttctgaccgtctgtctgacaacgacccgttcgacgcttggggtccgggtaccgttgttaccgtttctccggcgtcgaccaaaggtccgtctgttttcccgctggctccgtcttctaaatctacctctggtggtaccgctgctctgggttgcctggttaaagactacttcccggaaccggttaccgtttcttggaactctggtgctctgacctctggtgttcacaccttcccggctgttctgcagtcttctggtctgtactctctgtcttctgttgttaccgttccgtcttcttctctgggtacccagacctacatctgcaacgttaaccacaaaccgtctaacaccaaagttgacaagaaagttgaaccgaaatcttgcctgcgatcgcggccaggccggccgcaccatcaccatcaccatggcgcatacccgtacgacgttccggactacgcttctactagttaggagggtggtggctctgagggtggcggttctgagggtggcggctctgagggaggcggttccggtggtggctctggttccggtgattttgattatgaaaagatggcaaacgctaataagggggctatgaccgaaaatgccgatgaaaacgcgctacagtctgacgctaaaggcaaacttgattctgtcgctactgattacggtgctgctatcgatggtttcattggtgacgtttccggccttgctaatggtaatggtgctactggtgattttgctggctctaattcccaaatggctcaagtcggtgacggtgataattcacctttaatgaataatttccgtcaatatttaccttccctccctcaatcggttgaatgtcgcccttttgtctttggcgctggtaaaccatatgaattttctattgattgtgacaaaataaacttattccgtggtgtctttgcgtttcttttatatgttgccacctttatgtatgtattttctacgtttgctaacatactgcgtaataaggagtcttaagctagctaacgatcgcccttcccaacagttgcgcagcctgaatggcgaatgggacgcgccctgtagcggcgcattaagcgcggcgggtgtggtggttacgcgcagcgtgaccgctacacttgccagcgccctagcgcccgctcctttcgctttcttcccttcctttctcgccacgttcgccggctttccccgtcaagctctaaatcgggggctccctttagggttccgatttagtgctttacggcacctcgaccccaaaaaacttgattagggtgatggttcacgtagtgggccatcgccctgatagacggtttttcgccctttgacgttggagtccacgttctttaatagtggactcttgttccaaactggaacaacactcaaccctatctcggtctattcttttgatttataagggattttgccgatttcggcctattggttaaaaaatgagctgatttaacaaaaatttaacgcgaattttaacaaaatattaacgcttacaatttag

SEQ ID NO: 415 - DNA, 5882 bp, Artificial Sequence
  H1 vector
gtggcacttttcggggaaatgtgcgcggaacccctatttgtttatttttctaaatacattcaaatatgtatccgctcatgagacaataaccctgataaatgcttcaataatattgaaaaaggaagagtatgagtattcaacatttccgtgtcgcccttattcccttttttgcggcattttgccttcctgtttttgctcacccagaaacgctggtgaaagtaaaagatgctgaagatcagttgggtgcacgagtgggttacatcgaactggatctcaacagcggtaagatccttgagagttttcgccccgaagaacgttttccaatgatgagcacttttaaagttctgctatgtggcgcggtattatcccgtattgacgccgggcaagagcaactcggtcgccgcatacactattctcagaatgacttggttgagtactcaccagtcacagaaaagcatcttacggatggcatgacagtaagagaattatgcagtgctgccataaccatgagtgataacactgcggccaacttacttctgacaacgatcggaggaccgaaggagctaaccgcttttttgcacaacatgggggatcatgtaactcgccttgatcgttgggaaccggagctgaatgaagccataccaaacgacgagcgtgacaccacgatgcctgtagcaatggcaacaacgttgcgcaaactattaactggcgaactacttactctagcttcccggcaacaattaatagactggatggaggcggataaagttgcaggaccacttctgcgctcggcccttccggctggctggtttattgctgataaatctggagccggtgagcgtgggtctcgcggtatcattgcagcactggggccagatggtaagccctcccgtatcgtagttatctacacgacggggagtcaggcaactatggatgaacgaaatagacagatcgctgagataggtgcctcactgattaagcattggtaactgtcagaccaagtttactcatatatactttagattgatttaaaacttcatttttaatttaaaaggatctaggtgaagatcctttttgataatctcatgaccaaaatcccttaacgtgagttttcgttccactgagcgtcagaccccgtagaaaagatcaaaggatcttcttgagatcctttttttctgcgcgtaatctgctgcttgcaaacaaaaaaaccaccgctaccagcggtggtttgtttgccggatcaagagctaccaactctttttccgaaggtaactggcttcagcagagcgcagataccaaatactgtccttctagtgtagccgtagttaggccaccacttcaagaactctgtagcaccgcctacatacctcgctctgctaatcctgttaccagtggctgctgccagtggcgataagtcgtgtcttaccgggttggactcaagacgatagttaccggataaggcgcagcggtcgggctgaacggggggttcgtgcacacagcccagcttggagcgaacgacctacaccgaactgagatacctacagcgtgagctatgagaaagcgccacgcttcccgaagggagaaaggcggacaggtatccggtaagcggcagggtcggaacaggagagcgcacgagggagcttccagggggaaacgcctggtatctttatagtcctgtcgggtttcgccacctctgacttgagcgtcgatttttgtgatgctcgtcaggggggcggagcctatggaaaaacgccagcaacgcggcctttttacggttcctggccttttgctggccttttgctcacatgttctttcctgcgttatcccctgattctgtggataaccgtattaccgcctttgagtgagctgataccgctcgccgcagccgaacgaccgagcgcagcgagtcagtgagcgaggaagcgacaccatcgaatggcgcaaaacctttcgcggtatggcatgatagcgcccggaagagagtcaattcagggtggtgaatgtgaaaccagtaacgttatacgatgtcgcagagtatgccggtgtctcttatcagaccgtttcccgcgtggtgaaccaggccagccacgtttctgcgaaaacgcgggaaaaagtggaagcggcgatggcggagctgaattacattcccaaccgcgtggcacaacaactggcgggcaaacagtcgttgctgattggcgttgccacctccagtctggccctgcacgcgccgtcgcaaattgtcgcggcgattaaatctcgcgccgatcaactgggtgccagcgtggtggtgtcgatggtagaacgaagcggcgtcgaagcctgtaaagcggcggtgcacaatcttctcgcgcaacgtgtcagtgggctgatcattaactatccgctggatgaccaggatgccattgctgtggaagctgcctgcactaatgttccggcgttatttcttgatgtctctgaccagacacccatcaacagtattattttctcccatgaagacggtacgcgactgggcgtggagcatctggtcgcattgggtcaccagcaaatcgcgctgttagcgggtccattaagttctgtctcggcgcgtctgcgtctggctggctggcataaatatctcactcgcaatcaaattcagccgatagcggaacgggaaggcgactggagtgccatgtccggttttcaacaaaccatgcaaatgctgaatgagggcatcgttcccactgcgatgctggttgccaacgatcagatggcgctgggcgcaatgcgtgccattaccgagtccgggctgcgcgttggtgcggatatctcggtagtgggatacgacgataccgaagacagctcatgttatatcccgccgttaaccaccatcaaacaggattttcgcctgctggggcaaaccagcgtggaccgcttgctgcaactctctcagggccaggcggtgaagggcaatcagctgttgcccgtctcactggtgaaaagaaaaaccaccctggcgcccaatacgcaaaccgcctctccccgcgcgttggccgattcattaatgcagctggcacgacaggtttcccgactggaaagcgggcagtgagcggtacccgataaaagcggcttcctgacaggaggccgttttgttttgcagcccacctcaacgcaattaatgtgagttagctcactcattaggcaccccaggctttacactttatgcttccggctcgtatgttgtgtggaattgtgagcggataacaattgaattaaggaggatataattatgaaatacctgctgccgaccgcagccgctggtctgctgctgctcgcggcctagccggccatggccgccggtgttgttatgacccagtctccgtctaccctgtctgcttctgttggtgacaccatcaccatcacctgccgtgcttctcagtctatcgaaacctggctggcttggtaccagcagaaaccgggtaaagctccgaaactgctgatctacaaggcttctaccctgaaaaccggtgttccgtctcgtttctctggttctggttctggtaccgagttcaccctgaccatctctggtctgcagttcgacgacttcgctacctaccactgccagcactacgctggttactctgctaccttcggtcagggtacccgtgttgaaatcaaacgtaccgttgctgctccgtctgttttcatcttcccgccgtctgacgaacagctgaaatctggtaccgcttctgttgtttgcctgctgaacaacttctacccgcgtgaagctaaagttcagtggaaagttgacaacgctctgcagtctggtaactctcaggaatctgttaccgaacaggactctaaagactctacctactctctgtcttctaccctgaccctgtctaaagctgactacgaaaagcacaaagtttacgcttgcgaagttacccaccagggtctgtcttctccggttaccaaatctttcaaccgtggtgaatgctaattaattaataaggaggatataattatgaaaaagacagctatcgcgattgcagtggcactggctggtttcgctaccgtagcctaggcggccgcagaagttcagctggttgaatctggtggtggtctggttaaagctggtggttctctgatcctgtcttgcggtgtttctaactttcgaatctctgctcacaccatgaactgggttagacgcgttccgggtggtggtctggaatgggttgcttctatctctacctcttctacctaccgtgactacgctgacgctgttaaaggtcgtttcaccgtttctcgtgacgacctggaagacttcgtttacctgcagatgcataaaatgcgtgttgaagacaccgctatctactactgcgctcgtaaaggttctgaccgtctgtctgacaacgacccgttcgacgcttggggtccgggtaccgttgttaccgtttctccggcgtcgaccaaaggtccgtctgttttcccgctggctccgtcttctaaatctacctctggtggtaccgctgctctgggttgcctggttaaagactacttcccggaaccggttaccgtttcttggaactctggtgctctgacctctggtgttcacaccttcccggctgttctgcagtcttctggtctgtactctctgtcttctgttgttaccgttccgtcttcttctctgggtacccagacctacatctgcaacgttaaccacaaaccgtctaacaccaaagttgacaagaaagttgaaccgaaatcttgcctgcgatcgcggccaggccggccgcaccatcaccatcaccatggcgcatacccgtacgacgttccggactacgcttctactagttaggagggtggtggctctgagggtggcggttctgagggtggcggctctgagggaggcggttccggtggtggctctggttccggtgattttgattatgaaaagatggcaaacgctaataagggggctatgaccgaaaatgccgatgaaaacgcgctacagtctgacgctaaaggcaaacttgattctgtcgctactgattacggtgctgctatcgatggtttcattggtgacgtttccggccttgctaatggtaatggtgctactggtgattttgctggctctaattcccaaatggctcaagtcggtgacggtgataattcacctttaatgaataatttccgtcaatatttaccttccctccctcaatcggttgaatgtcgcccttttgtctttggcgctggtaaaccatatgaattttctattgattgtgacaaaataaacttattccgtggtgtctttgcgtttcttttatatgttgccacctttatgtatgtattttctacgtttgctaacatactgcgtaataaggagtcttaagctagctaacgatcgcccttcccaacagttgcgcagcctgaatggcgaatgggacgcgccctgtagcggcgcattaagcgcggcgggtgtggtggttacgcgcagcgtgaccgctacacttgccagcgccctagcgcccgctcctttcgctttcttcccttcctttctcgccacgttcgccggctttccccgtcaagctctaaatcgggggctccctttagggttccgatttagtgctttacggcacctcgaccccaaaaaacttgattagggtgatggttcacgtagtgggccatcgccctgatagacggtttttcgccctttgacgttggagtccacgttctttaatagtggactcttgttccaaactggaacaacactcaaccctatctcggtctattcttttgatttataagggattttgccgatttcggcctattggttaaaaaatgagctgatttaacaaaaatttaacgcgaattttaacaaaatattaacgcttacaatttag

SEQ ID NO: 416 - DNA, 5882 bp, Artificial Sequence
  H3 vector
gtggcacttttcggggaaatgtgcgcggaacccctatttgtttatttttctaaatacattcaaatatgtatccgctcatgagacaataaccctgataaatgcttcaataatattgaaaaaggaagagtatgagtattcaacatttccgtgtcgcccttattcccttttttgcggcattttgccttcctgtttttgctcacccagaaacgctggtgaaagtaaaagatgctgaagatcagttgggtgcacgagtgggttacatcgaactggatctcaacagcggtaagatccttgagagttttcgccccgaagaacgttttccaatgatgagcacttttaaagttctgctatgtggcgcggtattatcccgtattgacgccgggcaagagcaactcggtcgccgcatacactattctcagaatgacttggttgagtactcaccagtcacagaaaagcatcttacggatggcatgacagtaagagaattatgcagtgctgccataaccatgagtgataacactgcggccaacttacttctgacaacgatcggaggaccgaaggagctaaccgcttttttgcacaacatgggggatcatgtaactcgccttgatcgttgggaaccggagctgaatgaagccataccaaacgacgagcgtgacaccacgatgcctgtagcaatggcaacaacgttgcgcaaactattaactggcgaactacttactctagcttcccggcaacaattaatagactggatggaggcggataaagttgcaggaccacttctgcgctcggcccttccggctggctggtttattgctgataaatctggagccggtgagcgtgggtctcgcggtatcattgcagcactggggccagatggtaagccctcccgtatcgtagttatctacacgacggggagtcaggcaactatggatgaacgaaatagacagatcgctgagataggtgcctcactgattaagcattggtaactgtcagaccaagtttactcatatatactttagattgatttaaaacttcatttttaatttaaaaggatctaggtgaagatcctttttgataatctcatgaccaaaatcccttaacgtgagttttcgttccactgagcgtcagaccccgtagaaaagatcaaaggatcttcttgagatcctttttttctgcgcgtaatctgctgcttgcaaacaaaaaaaccaccgctaccagcggtggtttgtttgccggatcaagagctaccaactctttttccgaaggtaactggcttcagcagagcgcagataccaaatactgtccttctagtgtagccgtagttaggccaccacttcaagaactctgtagcaccgcctacatacctcgctctgctaatcctgttaccagtggctgctgccagtggcgataagtcgtgtcttaccgggttggactcaagacgatagttaccggataaggcgcagcggtcgggctgaacggggggttcgtgcacacagcccagcttggagcgaacgacctacaccgaactgagatacctacagcgtgagctatgagaaagcgccacgcttcccgaagggagaaaggcggacaggtatccggtaagcggcagggtcggaacaggagagcgcacgagggagcttccagggggaaacgcctggtatctttatagtcctgtcgggtttcgccacctctgacttgagcgtcgatttttgtgatgctcgtcaggggggcggagcctatggaaaaacgccagcaacgcggcctttttacggttcctggccttttgctggccttttgctcacatgttctttcctgcgttatcccctgattctgtggataaccgtattaccgcctttgagtgagctgataccgctcgccgcagccgaacgaccgagcgcagcgagtcagtgagcgaggaagcgacaccatcgaatggcgcaaaacctttcgcggtatggcatgatagcgcccggaagagagtcaattcagggtggtgaatgtgaaaccagtaacgttatacgatgtcgcagagtatgccggtgtctcttatcagaccgtttcccgcgtggtgaaccaggccagccacgtttctgcgaaaacgcgggaaaaagtggaagcggcgatggcggagctgaattacattcccaaccgcgtggcacaacaactggcgggcaaacagtcgttgctgattggcgttgccacctccagtctggccctgcacgcgccgtcgcaaattgtcgcggcgattaaatctcgcgccgatcaactgggtgccagcgtggtggtgtcgatggtagaacgaagcggcgtcgaagcctgtaaagcggcggtgcacaatcttctcgcgcaacgtgtcagtgggctgatcattaactatccgctggatgaccaggatgccattgctgtggaagctgcctgcactaatgttccggcgttatttcttgatgtctctgaccagacacccatcaacagtattattttctcccatgaagacggtacgcgactgggcgtggagcatctggtcgcattgggtcaccagcaaatcgcgctgttagcgggtccattaagttctgtctcggcgcgtctgcgtctggctggctggcataaatatctcactcgcaatcaaattcagccgatagcggaacgggaaggcgactggagtgccatgtccggttttcaacaaaccatgcaaatgctgaatgagggcatcgttcccactgcgatgctggttgccaacgatcagatggcgctgggcgcaatgcgtgccattaccgagtccgggctgcgcgttggtgcggatatctcggtagtgggatacgacgataccgaagacagctcatgttatatcccgccgttaaccaccatcaaacaggattttcgcctgctggggcaaaccagcgtggaccgcttgctgcaactctctcagggccaggcggtgaagggcaatcagctgttgcccgtctcactggtgaaaagaaaaaccaccctggcgcccaatacgcaaaccgcctctccccgcgcgttggccgattcattaatgcagctggcacgacaggtttcccgactggaaagcgggcagtgagcggtacccgataaaagcggcttcctgacaggaggccgttttgttttgcagcccacctcaacgcaattaatgtgagttagctcactcattaggcaccccaggctttacactttatgcttccggctcgtatgttgtgtggaattgtgagcggataacaattgaattaaggaggatataattatgaaatacctgctgccgaccgcagccgctggtctgctgctgctcgcggcctagccggccatggccgccggtgttgttatgacccagtctccgtctaccctgtctgcttctgttggtgacaccatcaccatcacctgccgtgcttctcagtctatcgaaacctggctggcttggtaccagcagaaaccgggtaaagctccgaaactgctgatctacaaggcttctaccctgaaaaccggtgttccgtctcgtttctctggttctggttctggtaccgagttcaccctgaccatctctggtctgcagttcgacgacttcgctacctaccactgccagcactacgctggttactctgctaccttcggtcagggtacccgtgttgaaatcaaacgtaccgttgctgctccgtctgttttcatcttcccgccgtctgacgaacagctgaaatctggtaccgcttctgttgtttgcctgctgaacaacttctacccgcgtgaagctaaagttcagtggaaagttgacaacgctctgcagtctggtaactctcaggaatctgttaccgaacaggactctaaagactctacctactctctgtcttctaccctgaccctgtctaaagctgactacgaaaagcacaaagtttacgcttgcgaagttacccaccagggtctgtcttctccggttaccaaatctttcaaccgtggtgaatgctaattaattaataaggaggatataattatgaaaaagacagctatcgcgattgcagtggcactggctggtttcgctaccgtagcctaggcggccgcagaagttcagctggttgaatctggtggtggtctggttaaagctggtggttctctgatcctgtcttgcggtgtttctaacttccgtatctctgctcacaccatgaactgggttcgtcgtgttccgggtggtggtctggaatgggttgcttctatctctacctcttctacctaccgtgactacgctgacgctgttaaaggtcgtttcaccgtttctcgtgacgacctggaagacttcgtttacctgcagatgcataaaatgcgtgttgaagacaccgctatctactactgcgcgcgtaaaggttctgaccgtctgtctgacaacgacccgttcgacgcttggggcccgggtaccgttgttaccgtttctccggcgtcgaccaaaggtccgtctgttttcccgctggctccgtcttctaaatctacctctggtggtaccgctgctctgggttgcctggttaaagactacttcccggaaccggttaccgtttcttggaactctggtgctctgacctctggtgttcacaccttcccggctgttctgcagtcttctggtctgtactctctgtcttctgttgttaccgttccgtcttcttctctgggtacccagacctacatctgcaacgttaaccacaaaccgtctaacaccaaagttgacaagaaagttgaaccgaaatcttgcctgcgatcgcggccaggccggccgcaccatcaccatcaccatggcgcatacccgtacgacgttccggactacgcttctactagttaggagggtggtggctctgagggtggcggttctgagggtggcggctctgagggaggcggttccggtggtggctctggttccggtgattttgattatgaaaagatggcaaacgctaataagggggctatgaccgaaaatgccgatgaaaacgcgctacagtctgacgctaaaggcaaacttgattctgtcgctactgattacggtgctgctatcgatggtttcattggtgacgtttccggccttgctaatggtaatggtgctactggtgattttgctggctctaattcccaaatggctcaagtcggtgacggtgataattcacctttaatgaataatttccgtcaatatttaccttccctccctcaatcggttgaatgtcgcccttttgtctttggcgctggtaaaccatatgaattttctattgattgtgacaaaataaacttattccgtggtgtctttgcgtttcttttatatgttgccacctttatgtatgtattttctacgtttgctaacatactgcgtaataaggagtcttaagctagctaacgatcgcccttcccaacagttgcgcagcctgaatggcgaatgggacgcgccctgtagcggcgcattaagcgcggcgggtgtggtggttacgcgcagcgtgaccgctacacttgccagcgccctagcgcccgctcctttcgctttcttcccttcctttctcgccacgttcgccggctttccccgtcaagctctaaatcgggggctccctttagggttccgatttagtgctttacggcacctcgaccccaaaaaacttgattagggtgatggttcacgtagtgggccatcgccctgatagacggtttttcgccctttgacgttggagtccacgttctttaatagtggactcttgttccaaactggaacaacactcaaccctatctcggtctattcttttgatttataagggattttgccgatttcggcctattggttaaaaaatgagctgatttaacaaaaatttaacgcgaattttaacaaaatattaacgcttacaatttag

SEQ ID NO: 417 - DNA, 5882 bp, Artificial Sequence
  H1H3 vector
gtggcacttttcggggaaatgtgcgcggaacccctatttgtttatttttctaaatacattcaaatatgtatccgctcatgagacaataaccctgataaatgcttcaataatattgaaaaaggaagagtatgagtattcaacatttccgtgtcgcccttattcccttttttgcggcattttgccttcctgtttttgctcacccagaaacgctggtgaaagtaaaagatgctgaagatcagttgggtgcacgagtgggttacatcgaactggatctcaacagcggtaagatccttgagagttttcgccccgaagaacgttttccaatgatgagcacttttaaagttctgctatgtggcgcggtattatcccgtattgacgccgggcaagagcaactcggtcgccgcatacactattctcagaatgacttggttgagtactcaccagtcacagaaaagcatcttacggatggcatgacagtaagagaattatgcagtgctgccataaccatgagtgataacactgcggccaacttacttctgacaacgatcggaggaccgaaggagctaaccgcttttttgcacaacatgggggatcatgtaactcgccttgatcgttgggaaccggagctgaatgaagccataccaaacgacgagcgtgacaccacgatgcctgtagcaatggcaacaacgttgcgcaaactattaactggcgaactacttactctagcttcccggcaacaattaatagactggatggaggcggataaagttgcaggaccacttctgcgctcggcccttccggctggctggtttattgctgataaatctggagccggtgagcgtgggtctcgcggtatcattgcagcactggggccagatggtaagccctcccgtatcgtagttatctacacgacggggagtcaggcaactatggatgaacgaaatagacagatcgctgagataggtgcctcactgattaagcattggtaactgtcagaccaagtttactcatatatactttagattgatttaaaacttcatttttaatttaaaaggatctaggtgaagatcctttttgataatctcatgaccaaaatcccttaacgtgagttttcgttccactgagcgtcagaccccgtagaaaagatcaaaggatcttcttgagatcctttttttctgcgcgtaatctgctgcttgcaaacaaaaaaaccaccgctaccagcggtggtttgtttgccggatcaagagctaccaactctttttccgaaggtaactggcttcagcagagcgcagataccaaatactgtccttctagtgtagccgtagttaggccaccacttcaagaactctgtagcaccgcctacatacctcgctctgctaatcctgttaccagtggctgctgccagtggcgataagtcgtgtcttaccgggttggactcaagacgatagttaccggataaggcgcagcggtcgggctgaacggggggttcgtgcacacagcccagcttggagcgaacgacctacaccgaactgagatacctacagcgtgagctatgagaaagcgccacgcttcccgaagggagaaaggcggacaggtatccggtaagcggcagggtcggaacaggagagcgcacgagggagcttccagggggaaacgcctggtatctttatagtcctgtcgggtttcgccacctctgacttgagcgtcgatttttgtgatgctcgtcaggggggcggagcctatggaaaaacgccagcaacgcggcctttttacggttcctggccttttgctggccttttgctcacatgttctttcctgcgttatcccctgattctgtggataaccgtattaccgcctttgagtgagctgataccgctcgccgcagccgaacgaccgagcgcagcgagtcagtgagcgaggaagcgacaccatcgaatggcgcaaaacctttcgcggtatggcatgatagcgcccggaagagagtcaattcagggtggtgaatgtgaaaccagtaacgttatacgatgtcgcagagtatgccggtgtctcttatcagaccgtttcccgcgtggtgaaccaggccagccacgtttctgcgaaaacgcgggaaaaagtggaagcggcgatggcggagctgaattacattcccaaccgcgtggcacaacaactggcgggcaaacagtcgttgctgattggcgttgccacctccagtctggccctgcacgcgccgtcgcaaattgtcgcggcgattaaatctcgcgccgatcaactgggtgccagcgtggtggtgtcgatggtagaacgaagcggcgtcgaagcctgtaaagcggcggtgcacaatcttctcgcgcaacgtgtcagtgggctgatcattaactatccgctggatgaccaggatgccattgctgtggaagctgcctgcactaatgttccggcgttatttcttgatgtctctgaccagacacccatcaacagtattattttctcccatgaagacggtacgcgactgggcgtggagcatctggtcgcattgggtcaccagcaaatcgcgctgttagcgggtccattaagttctgtctcggcgcgtctgcgtctggctggctggcataaatatctcactcgcaatcaaattcagccgatagcggaacgggaaggcgactggagtgccatgtccggttttcaacaaaccatgcaaatgctgaatgagggcatcgttcccactgcgatgctggttgccaacgatcagatggcgctgggcgcaatgcgtgccattaccgagtccgggctgcgcgttggtgcggatatctcggtagtgggatacgacgataccgaagacagctcatgttatatcccgccgttaaccaccatcaaacaggattttcgcctgctggggcaaaccagcgtggaccgcttgctgcaactctctcagggccaggcggtgaagggcaatcagctgttgcccgtctcactggtgaaaagaaaaaccaccctggcgcccaatacgcaaaccgcctctccccgcgcgttggccgattcattaatgcagctggcacgacaggtttcccgactggaaagcgggcagtgagcggtacccgataaaagcggcttcctgacaggaggccgttttgttttgcagcccacctcaacgcaattaatgtgagttagctcactcattaggcaccccaggctttacactttatgcttccggctcgtatgttgtgtggaattgtgagcggataacaattgaattaaggaggatataattatgaaatacctgctgccgaccgcagccgctggtctgctgctgctcgcggcctagccggccatggccgccggtgttgttatgacccagtctccgtctaccctgtctgcttctgttggtgacaccatcaccatcacctgccgtgcttctcagtctatcgaaacctggctggcttggtaccagcagaaaccgggtaaagctccgaaactgctgatctacaaggcttctaccctgaaaaccggtgttccgtctcgtttctctggttctggttctggtaccgagttcaccctgaccatctctggtctgcagttcgacgacttcgctacctaccactgccagcactacgctggttactctgctaccttcggtcagggtacccgtgttgaaatcaaacgtaccgttgctgctccgtctgttttcatcttcccgccgtctgacgaacagctgaaatctggtaccgcttctgttgtttgcctgctgaacaacttctacccgcgtgaagctaaagttcagtggaaagttgacaacgctctgcagtctggtaactctcaggaatctgttaccgaacaggactctaaagactctacctactctctgtcttctaccctgaccctgtctaaagctgactacgaaaagcacaaagtttacgcttgcgaagttacccaccagggtctgtcttctccggttaccaaatctttcaaccgtggtgaatgctaattaattaataaggaggatataattatgaaaaagacagctatcgcgattgcagtggcactggctggtttcgctaccgtagcctaggcggccgcagaagttcagctggttgaatctggtggtggtctggttaaagctggtggttctctgatcctgtcttgcggtgtttctaactttcgaatctctgctcacaccatgaactgggttagacgcgttccgggtggtggtctggaatgggttgcttctatctctacctcttctacctaccgtgactacgctgacgctgttaaaggtcgtttcaccgtttctcgtgacgacctggaagacttcgtttacctgcagatgcataaaatgcgtgttgaagacaccgctatctactactgcgcgcgtaaaggttctgaccgtctgtctgacaacgacccgttcgacgcttggggcccgggtaccgttgttaccgtttctccggcgtcgaccaaaggtccgtctgttttcccgctggctccgtcttctaaatctacctctggtggtaccgctgctctgggttgcctggttaaagactacttcccggaaccggttaccgtttcttggaactctggtgctctgacctctggtgttcacaccttcccggctgttctgcagtcttctggtctgtactctctgtcttctgttgttaccgttccgtcttcttctctgggtacccagacctacatctgcaacgttaaccacaaaccgtctaacaccaaagttgacaagaaagttgaaccgaaatcttgcctgcgatcgcggccaggccggccgcaccatcaccatcaccatggcgcatacccgtacgacgttccggactacgcttctactagttaggagggtggtggctctgagggtggcggttctgagggtggcggctctgagggaggcggttccggtggtggctctggttccggtgattttgattatgaaaagatggcaaacgctaataagggggctatgaccgaaaatgccgatgaaaacgcgctacagtctgacgctaaaggcaaacttgattctgtcgctactgattacggtgctgctatcgatggtttcattggtgacgtttccggccttgctaatggtaatggtgctactggtgattttgctggctctaattcccaaatggctcaagtcggtgacggtgataattcacctttaatgaataatttccgtcaatatttaccttccctccctcaatcggttgaatgtcgcccttttgtctttggcgctggtaaaccatatgaattttctattgattgtgacaaaataaacttattccgtggtgtctttgcgtttcttttatatgttgccacctttatgtatgtattttctacgtttgctaacatactgcgtaataaggagtcttaagctagctaacgatcgcccttcccaacagttgcgcagcctgaatggcgaatgggacgcgccctgtagcggcgcattaagcgcggcgggtgtggtggttacgcgcagcgtgaccgctacacttgccagcgccctagcgcccgctcctttcgctttcttcccttcctttctcgccacgttcgccggctttccccgtcaagctctaaatcgggggctccctttagggttccgatttagtgctttacggcacctcgaccccaaaaaacttgattagggtgatggttcacgtagtgggccatcgccctgatagacggtttttcgccctttgacgttggagtccacgttctttaatagtggactcttgttccaaactggaacaacactcaaccctatctcggtctattcttttgatttataagggattttgccgatttcggcctattggttaaaaaatgagctgatttaacaaaaatttaacgcgaattttaacaaaatattaacgcttacaatttag

SEQ ID NO: 418 - DNA, 5882 bp, Artificial Sequence
  L3H3 vector
gtggcacttttcggggaaatgtgcgcggaacccctatttgtttatttttctaaatacattcaaatatgtatccgctcatgagacaataaccctgataaatgcttcaataatattgaaaaaggaagagtatgagtattcaacatttccgtgtcgcccttattcccttttttgcggcattttgccttcctgtttttgctcacccagaaacgctggtgaaagtaaaagatgctgaagatcagttgggtgcacgagtgggttacatcgaactggatctcaacagcggtaagatccttgagagttttcgccccgaagaacgttttccaatgatgagcacttttaaagttctgctatgtggcgcggtattatcccgtattgacgccgggcaagagcaactcggtcgccgcatacactattctcagaatgacttggttgagtactcaccagtcacagaaaagcatcttacggatggcatgacagtaagagaattatgcagtgctgccataaccatgagtgataacactgcggccaacttacttctgacaacgatcggaggaccgaaggagctaaccgcttttttgcacaacatgggggatcatgtaactcgccttgatcgttgggaaccggagctgaatgaagccataccaaacgacgagcgtgacaccacgatgcctgtagcaatggcaacaacgttgcgcaaactattaactggcgaactacttactctagcttcccggcaacaattaatagactggatggaggcggataaagttgcaggaccacttctgcgctcggcccttccggctggctggtttattgctgataaatctggagccggtgagcgtgggtctcgcggtatcattgcagcactggggccagatggtaagccctcccgtatcgtagttatctacacgacggggagtcaggcaactatggatgaacgaaatagacagatcgctgagataggtgcctcactgattaagcattggtaactgtcagaccaagtttactcatatatactttagattgatttaaaacttcatttttaatttaaaaggatctaggtgaagatcctttttgataatctcatgaccaaaatcccttaacgtgagttttcgttccactgagcgtcagaccccgtagaaaagatcaaaggatcttcttgagatcctttttttctgcgcgtaatctgctgcttgcaaacaaaaaaaccaccgctaccagcggtggtttgtttgccggatcaagagctaccaactctttttccgaaggtaactggcttcagcagagcgcagataccaaatactgtccttctagtgtagccgtagttaggccaccacttcaagaactctgtagcaccgcctacatacctcgctctgctaatcctgttaccagtggctgctgccagtggcgataagtcgtgtcttaccgggttggactcaagacgatagttaccggataaggcgcagcggtcgggctgaacggggggttcgtgcacacagcccagcttggagcgaacgacctacaccgaactgagatacctacagcgtgagctatgagaaagcgccacgcttcccgaagggagaaaggcggacaggtatccggtaagcggcagggtcggaacaggagagcgcacgagggagcttccagggggaaacgcctggtatctttatagtcctgtcgggtttcgccacctctgacttgagcgtcgatttttgtgatgctcgtcaggggggcggagcctatggaaaaacgccagcaacgcggcctttttacggttcctggccttttgctggccttttgctcacatgttctttcctgcgttatcccctgattctgtggataaccgtattaccgcctttgagtgagctgataccgctcgccgcagccgaacgaccgagcgcagcgagtcagtgagcgaggaagcgacaccatcgaatggcgcaaaacctttcgcggtatggcatgatagcgcccggaagagagtcaattcagggtggtgaatgtgaaaccagtaacgttatacgatgtcgcagagtatgccggtgtctcttatcagaccgtttcccgcgtggtgaaccaggccagccacgtttctgcgaaaacgcgggaaaaagtggaagcggcgatggcggagctgaattacattcccaaccgcgtggcacaacaactggcgggcaaacagtcgttgctgattggcgttgccacctccagtctggccctgcacgcgccgtcgcaaattgtcgcggcgattaaatctcgcgccgatcaactgggtgccagcgtggtggtgtcgatggtagaacgaagcggcgtcgaagcctgtaaagcggcggtgcacaatcttctcgcgcaacgtgtcagtgggctgatcattaactatccgctggatgaccaggatgccattgctgtggaagctgcctgcactaatgttccggcgttatttcttgatgtctctgaccagacacccatcaacagtattattttctcccatgaagacggtacgcgactgggcgtggagcatctggtcgcattgggtcaccagcaaatcgcgctgttagcgggtccattaagttctgtctcggcgcgtctgcgtctggctggctggcataaatatctcactcgcaatcaaattcagccgatagcggaacgggaaggcgactggagtgccatgtccggttttcaacaaaccatgcaaatgctgaatgagggcatcgttcccactgcgatgctggttgccaacgatcagatggcgctgggcgcaatgcgtgccattaccgagtccgggctgcgcgttggtgcggatatctcggtagtgggatacgacgataccgaagacagctcatgttatatcccgccgttaaccaccatcaaacaggattttcgcctgctggggcaaaccagcgtggaccgcttgctgcaactctctcagggccaggcggtgaagggcaatcagctgttgcccgtctcactggtgaaaagaaaaaccaccctggcgcccaatacgcaaaccgcctctccccgcgcgttggccgattcattaatgcagctggcacgacaggtttcccgactggaaagcgggcagtgagcggtacccgataaaagcggcttcctgacaggaggccgttttgttttgcagcccacctcaacgcaattaatgtgagttagctcactcattaggcaccccaggctttacactttatgcttccggctcgtatgttgtgtggaattgtgagcggataacaattgaattaaggaggatataattatgaaatacctgctgccgaccgcagccgctggtctgctgctgctcgcggcctagccggccatggccgccggtgttgttatgacccagtctccgtctaccctgtctgcttctgttggtgacaccatcaccatcacctgccgtgcttctcagtctatcgaaacctggctggcttggtaccagcagaaaccgggtaaagctccgaaactgctgatctacaaggcttctaccctgaaaaccggtgttccgtctcgtttctctggttctggttctggtaccgagttcaccctgaccatctctggtctgcagttcgacgacttcgctacgtaccactgccagcactacgctggttactctgctaccttcggtcagggtacacgcgttgaaatcaaacgtaccgttgctgctccgtctgttttcatcttcccgccgtctgacgaacagctgaaatctggtaccgcttctgttgtttgcctgctgaacaacttctacccgcgtgaagctaaagttcagtggaaagttgacaacgctctgcagtctggtaactctcaggaatctgttaccgaacaggactctaaagactctacctactctctgtcttctaccctgaccctgtctaaagctgactacgaaaagcacaaagtttacgcttgcgaagttacccaccagggtctgtcttctccggttaccaaatctttcaaccgtggtgaatgctaattaattaataaggaggatataattatgaaaaagacagctatcgcgattgcagtggcactggctggtttcgctaccgtagcctaggcggccgcagaagttcagctggttgaatctggtggtggtctggttaaagctggtggttctctgatcctgtcttgcggtgtttctaacttccgtatctctgctcacaccatgaactgggttcgtcgtgttccgggtggtggtctggaatgggttgcttctatctctacctcttctacctaccgtgactacgctgacgctgttaaaggtcgtttcaccgtttctcgtgacgacctggaagacttcgtttacctgcagatgcataaaatgcgtgttgaagacaccgctatctactactgcgcgcgtaaaggttctgaccgtctgtctgacaacgacccgttcgacgcttggggcccgggtaccgttgttaccgtttctccggcgtcgaccaaaggtccgtctgttttcccgctggctccgtcttctaaatctacctctggtggtaccgctgctctgggttgcctggttaaagactacttcccggaaccggttaccgtttcttggaactctggtgctctgacctctggtgttcacaccttcccggctgttctgcagtcttctggtctgtactctctgtcttctgttgttaccgttccgtcttcttctctgggtacccagacctacatctgcaacgttaaccacaaaccgtctaacaccaaagttgacaagaaagttgaaccgaaatcttgcctgcgatcgcggccaggccggccgcaccatcaccatcaccatggcgcatacccgtacgacgttccggactacgcttctactagttaggagggtggtggctctgagggtggcggttctgagggtggcggctctgagggaggcggttccggtggtggctctggttccggtgattttgattatgaaaagatggcaaacgctaataagggggctatgaccgaaaatgccgatgaaaacgcgctacagtctgacgctaaaggcaaacttgattctgtcgctactgattacggtgctgctatcgatggtttcattggtgacgtttccggccttgctaatggtaatggtgctactggtgattttgctggctctaattcccaaatggctcaagtcggtgacggtgataattcacctttaatgaataatttccgtcaatatttaccttccctccctcaatcggttgaatgtcgcccttttgtctttggcgctggtaaaccatatgaattttctattgattgtgacaaaataaacttattccgtggtgtctttgcgtttcttttatatgttgccacctttatgtatgtattttctacgtttgctaacatactgcgtaataaggagtcttaagctagctaacgatcgcccttcccaacagttgcgcagcctgaatggcgaatgggacgcgccctgtagcggcgcattaagcgcggcgggtgtggtggttacgcgcagcgtgaccgctacacttgccagcgccctagcgcccgctcctttcgctttcttcccttcctttctcgccacgttcgccggctttccccgtcaagctctaaatcgggggctccctttagggttccgatttagtgctttacggcacctcgaccccaaaaaacttgattagggtgatggttcacgtagtgggccatcgccctgatagacggtttttcgccctttgacgttggagtccacgttctttaatagtggactcttgttccaaactggaacaacactcaaccctatctcggtctattcttttgatttataagggattttgccgatttcggcctattggttaaaaaatgagctgatttaacaaaaatttaacgcgaattttaacaaaatattaacgcttacaatttag

SEQ ID NO: 419 - DNA, 5882 bp, Artificial Sequence
  Clone7
gtggcacttttcggggaaatgtgcgcggaacccctatttgtttatttttctaaatacattcaaatatgtatccgctcatgagacaataaccctgataaatgcttcaataatattgaaaaaggaagagtatgagtattcaacatttccgtgtcgcccttattcccttttttgcggcattttgccttcctgtttttgctcacccagaaacgctggtgaaagtaaaagatgctgaagatcagttgggtgcacgagtgggttacatcgaactggatctcaacagcggtaagatccttgagagttttcgccccgaagaacgttttccaatgatgagcacttttaaagttctgctatgtggcgcggtattatcccgtattgacgccgggcaagagcaactcggtcgccgcatacactattctcagaatgacttggttgagtactcaccagtcacagaaaagcatcttacggatggcatgacagtaagagaattatgcagtgctgccataaccatgagtgataacactgcggccaacttacttctgacaacgatcggaggaccgaaggagctaaccgcttttttgcacaacatgggggatcatgtaactcgccttgatcgttgggaaccggagctgaatgaagccataccaaacgacgagcgtgacaccacgatgcctgtagcaatggcaacaacgttgcgcaaactattaactggcgaactacttactctagcttcccggcaacaattaatagactggatggaggcggataaagttgcaggaccacttctgcgctcggcccttccggctggctggtttattgctgataaatctggagccggtgagcgtgggtctcgcggtatcattgcagcactggggccagatggtaagccctcccgtatcgtagttatctacacgacggggagtcaggcaactatggatgaacgaaatagacagatcgctgagataggtgcctcactgattaagcattggtaactgtcagaccaagtttactcatatatactttagattgatttaaaacttcatttttaatttaaaaggatctaggtgaagatcctttttgataatctcatgaccaaaatcccttaacgtgagttttcgttccactgagcgtcagaccccgtagaaaagatcaaaggatcttcttgagatcctttttttctgcgcgtaatctgctgcttgcaaacaaaaaaaccaccgctaccagcggtggtttgtttgccggatcaagagctaccaactctttttccgaaggtaactggcttcagcagagcgcagataccaaatactgtccttctagtgtagccgtagttaggccaccacttcaagaactctgtagcaccgcctacatacctcgctctgctaatcctgttaccagtggctgctgccagtggcgataagtcgtgtcttaccgggttggactcaagacgatagttaccggataaggcgcagcggtcgggctgaacggggggttcgtgcacacagcccagcttggagcgaacgacctacaccgaactgagatacctacagcgtgagctatgagaaagcgccacgcttcccgaagggagaaaggcggacaggtatccggtaagcggcagggtcggaacaggagagcgcacgagggagcttccagggggaaacgcctggtatctttatagtcctgtcgggtttcgccacctctgacttgagcgtcgatttttgtgatgctcgtcaggggggcggagcctatggaaaaacgccagcaacgcggcctttttacggttcctggccttttgctggccttttgctcacatgttctttcctgcgttatcccctgattctgtggataaccgtattaccgcctttgagtgagctgataccgctcgccgcagccgaacgaccgagcgcagcgagtcagtgagcgaggaagcgacaccatcgaatggcgcaaaacctttcgcggtatggcatgatagcgcccggaagagagtcaattcagggtggtgaatgtgaaaccagtaacgttatacgatgtcgcagagtatgccggtgtctcttatcagaccgtttcccgcgtggtgaaccaggccagccacgtttctgcgaaaacgcgggaaaaagtggaagcggcgatggcggagctgaattacattcccaaccgcgtggcacaacaactggcgggcaaacagtcgttgctgattggcgttgccacctccagtctggccctgcacgcgccgtcgcaaattgtcgcggcgattaaatctcgcgccgatcaactgggtgccagcgtggtggtgtcgatggtagaacgaagcggcgtcgaagcctgtaaagcggcggtgcacaatcttctcgcgcaacgcgtcagtgggctgatcattaactatccgctggatgaccaggatgccattgctgtggaagctgcctgcactaatgttccggcgttatttcttgatgtctctgaccagacacccatcaacagtattattttctcccatgaagacggtacgcgactgggcgtggagcatctggtcgcattgggtcaccagcaaatcgcgctgttagcgggcccattaagttctgtctcggcgcgtctgcgtctggctggctggcataaatatctcactcgcaatcaaattcagccgatagcggaacgggaaggcgactggagtgccatgtccggttttcaacaaaccatgcaaatgctgaatgagggcatcgttcccactgcgatgctggttgccaacgatcagatggcgctgggcgcaatgcgcgccattaccgagtccgggctgcgcgttggtgcggatatctcggtagtgggatacgacgataccgaagacagctcatgttatatcccgccgttaaccaccatcaaacaggattttcgcctgctggggcaaaccagcgtggaccgcttgctgcaactctctcagggccaggcggtgaagggcaatcagctgttgcccgtctcactggtgaaaagaaaaaccaccctggcgcccaatacgcaaaccgcctctccccgcgcgttggccgattcattaatgcagctggcacgacaggtttcccgactggaaagcgggcagtgagcggtacccgataaaagcggcttcctgacaggaggccgttttgttttgcagcccacctcaacgcaattaatgtgagttagctcactcattaggcaccccaggctttacactttatgcttccggctcgtatgttgtgtggaattgtgagcggataacaattgaattaaggaggatataattatgaaatacctgctgccgaccgcagccgctggtctgctgctgctcgcggcctagccggccatggccgccggtgttgttatgacccagtctccgtctaccctgtctgcttctgttggtgacaccatcaccatcacctgccgtgcttctcagtctatcgaaacctggctggcttggtaccagcagaaaccgggtaaagctccgaaactgctgatctacaaggcttctaccctgaaaaccggtgttccgtctcgtttctctggttctggttctggtaccgagttcaccctgaccatctctggtctgcagttcgacgacttcgctacctaccactgccagcactacgctggttactctgctaccttcggtcagggtacccgtgttgaaatcaaacgtaccgttgctgctccgtctgttttcatcttcccgccgtctgacgaacagctgaaatctggtaccgcttctgttgtttgcctgctgaacaacttctacccgcgtgaagctaaagttcagtggaaagttgacaacgctctgcagtctggtaactctcaggaatctgttaccgaacaggactctaaagactctacctactctctgtcttctaccctgaccctgtctaaagctgactacgaaaagcacaaagtttacgcttgcgaagttacccaccagggtctgtcttctccggttaccaaatctttcaaccgtggtgaatgctaattaattaataaggaggatataattatgaaaaagacagctatcgcgattgcagtggcactggctggtttcgctaccgtagcctaggcggccgcagaagttcagctggttgaatctggtggtggtctggttaaagctggtggttctctgatcctgtcttgcggtgtttctaactttcgaatctcttcccactccatgtactgggttagacgcgttccgggtggtggtctggaatgggttgcttctatctctacctcttctacctaccgtgactacgctgacgctgttaaaggtcgtttcaccgtttctcgtgacgacctggaagacttcgtttacctgcagatgcataaaatgcgtgttgaagacaccgctatctactactgcgcgcgtgggagctacgacggctactacgccaactacccgttcgacgcttggggcccgggtaccgttgttaccgtttctccggcgtcgaccaaaggtccgtctgttttcccgctggctccgtcttctaaatctacctctggtggtaccgctgctctgggttgcctggttaaagactacttcccggaaccggttaccgtttcttggaactctggtgctctgacctctggtgttcacaccttcccggctgttctgcagtcttctggtctgtactctctgtcttctgttgttaccgttccgtcttcttctctgggtacccagacctacatctgcaacgttaaccacaaaccgtctaacaccaaagttgacaagaaagttgaaccgaaatcttgcctgcgatcgcggccaggccggccgcaccatcaccatcaccatggcgcatacccgtacgacgttccggactacgcttctactagttaggagggtggtggctctgagggtggcggttctgagggtggcggctctgagggaggcggttccggtggtggctctggttccggtgattttgattatgaaaagatggcaaacgctaataagggggctatgaccgaaaatgccgatgaaaacgcgctacagtctgacgctaaaggcaaacttgattctgtcgctactgattacggtgctgctatcgatggtttcattggtgacgtttccggccttgctaatggtaatggtgctactggtgattttgctggctctaattcccaaatggctcaagtcggtgacggtgataattcacctttaatgaataatttccgtcaatatttaccttccctccctcaatcggttgaatgtcgcccttttgtctttggcgctggtaaaccatatgaattttctattgattgtgacaaaataaacttattccgtggtgtctttgcgtttcttttatatgttgccacctttatgtatgtattttctacgtttgctaacatactgcgtaataaggagtcttaagctagctaacgatcgcccttcccaacagttgcgcagcctgaatggcgaatgggacgcgccctgtagcggcgcattaagcgcggcgggtgtggtggttacgcgcagcgtgaccgctacacttgccagcgccctagcgcccgctcctttcgctttcttcccttcctttctcgccacgttcgccggctttccccgtcaagctctaaatcgggggctccctttagggttccgatttagtgctttacggcacctcgaccccaaaaaacttgattagggtgatggttcacgtagtgggccatcgccctgatagacggtttttcgccctttgacgttggagtccacgttctttaatagtggactcttgttccaaactggaacaacactcaaccctatctcggtctattcttttgatttataagggattttgccgatttcggcctattggttaaaaaatgagctgatttaacaaaaatttaacgcgaattttaacaaaatattaacgcttacaatttag

SEQ ID NO: 420 - DNA, 24 bp, Artificial Sequence
  A
gcccaggcggccgcagaagttcag

SEQ ID NO: 421 - DNA, 48 bp, Artificial Sequence
  B
  variation 24, 25, 27, 28: n = a, c, g or t
gaacacgacgaacccagttcatmnnannagcagagatacggaagttag

SEQ ID NO: 422 - DNA, 48 bp, Artificial Sequence
  C
  variation 21, 22, 24, 25: n = a, c, g or t
ctaacttccgtatctctgctnntnnkatgaactgggttcgtcgtgttc

SEQ ID NO: 423 - DNA, 72 bp, Artificial Sequence
  D
  variation 24, 25, 27, 28, 33, 34, 36, 37, 48, 49: n = a, c, g or t
ccggaccccaagcgtcgaacggmnnmnngtcmnnannacggtcagamnntttacgagcgcagtagtagatag

SEQ ID NO: 424 - DNA, 58 bp, Artificial Sequence
  E
cctttggtcgacgccggagaaacggtaacaacggtacccggaccccaagcgtcgaacg

SEQ ID NO: 425 - DNA, 45 bp, Artificial Sequence; identical to SEQ ID NO: 349
  CALX24H1S-F

SEQ ID NO: 426 - DNA, 23 bp, Artificial Sequence
  H1S-R
agacaggatcagagaaccaccag

SEQ ID NO: 427 - DNA, 21 bp, Artificial Sequence
  H1L-F
gcggccgcagaagttcagctg

SEQ ID NO: 428 - DNA, 24 bp, Artificial Sequence
  H1L-R
agcagagatacggaagttagaaac

SEQ ID NO: 429 - DNA, 30 bp, Artificial Sequence
  H2-F
tgcggtgtttctaacttccgtatctctgct

SEQ ID NO: 430 - DNA, 30 bp, Artificial Sequence
  H2-R
accacccggaacacgacgaacccagttcat

SEQ ID NO: 431 - DNA, 24 bp, Artificial Sequence
  H3L-F
atgaactgggttcgtcgtgttccg

SEQ ID NO: 432 - DNA, 24 bp, Artificial Sequence
  H3L-R
tttacgagcgcagtagtagatagc

SEQ ID NO: 433 - DNA, 24 bp, Artificial Sequence
  H3S-F
ggtctggaatgggttgcttctatc

SEQ ID NO: 434 - DNA, 24 bp, Artificial Sequence
  H3S-R
ttcaacacgcattttatgcatctg

SEQ ID NO: 435 - DNA, 30 bp, Artificial Sequence
  H4-F
gacaccgctatctactactgcgctcgtaaa

SEQ ID NO: 436 - DNA, 30 bp, Artificial Sequence
  H4-R
aacggtacccggaccccaagcgtcgaacgg

SEQ ID NO: 437 - DNA, 21 bp, Artificial Sequence
  H5-F
ccgttcgacgcttggggtccg

SEQ ID NO: 438 - DNA, 47 bp, Artificial Sequence
  CALX24H5-F
gttaccgtttctccggcgtcgacgttactgagcgatggcacagcggc

SEQ ID NO: 439 - DNA, 47 bp, Artificial Sequence
  CALX24H5-R
gccgctgtgccatcgctcagtaacgtcgacgccggagaaacggtaac

SEQ ID NO: 440 - DNA, 76 bp, Artificial Sequence
  H1
ggccgcagaagttcagctggttgaatctggtggtggtctggttaaagctggtggttctctgatcctgtcttgcggt

SEQ ID NO: 441 - DNA, 84 bp, Artificial Sequence
  H2
gaagttagaaacaccgcaagacaggatcagagaaccaccagctttaaccagaccaccaccagattcaaccagctgaacttctgc

SEQ ID NO: 442 - DNA, 40 bp, Artificial Sequence
  H3
  variation 25, 26, 28, 29: n = a, c, g or t
gtttctaacttccgtatctctgctnntnnkatgaactggg

SEQ ID NO: 443 - DNA, 40 bp, Artificial Sequence
  H4
  variation 24, 25, 27, 28: n = a, c, g or t
gaacacgacgaacccagttcatmnnannagcagagatacg

SEQ ID NO: 444 - DNA, 82 bp, Artificial Sequence
  H5
ttcgtcgtgttccgggtggtggtctggaatgggttgcttctatctctacctcttctacctaccgtgactacgctgacgctgt

SEQ ID NO: 445 - DNA, 82 bp, Artificial Sequence
  H6
aaacgacctttaacagcgtcagcgtagtcacggtaggtagaagaggtagagatagaagcaacccattccagaccaccacccg

SEQ ID NO: 446 - DNA, 82 bp, Artificial Sequence
  H7
taaaggtcgtttcaccgtttctcgtgacgacctggaagacttcgtttacctgcagatgcataaaatgcgtgttgaagacacc

SEQ ID NO: 447 - DNA, 82 bp, Artificial Sequence
  H8
gtagtagatagcggtgtcttcaacacgcattttatgcatctgcaggtaaacgaagtcttccaggtcgtcacgagaaacggtg

SEQ ID NO: 448 - DNA, 69 bp, Artificial Sequence
  H9
  variation 25, 26, 37, 38, 40, 41, 46, 47, 49, 50: n = a, c, g or t
gctatctactactgcgctcgtaaannktctgaccgtnntnnkgacnnknnkccgttcgacgcttggggt

SEQ ID NO: 449 - DNA, 69 bp, Artificial Sequence
  H10
  variation 32, 33, 35, 36, 41, 42, 44, 45, 56, 57: n = a, c, g or t
aacggtacccggaccccaagcgtcgaacggmnnmnngtcmnnannacggtcagamnntttacgagcgca

SEQ ID NO: 450 - DNA, 30 bp, Artificial Sequence
  H11
ccgggtaccgttgttaccgtttctccggcg

SEQ ID NO: 451 - DNA, 22 bp, Artificial Sequence
  H12
tcgacgccggagaaacggtaac

SEQ ID NO: 452 - DNA, 25 bp, Artificial Sequence
  OHGLSPA-F
ggctggtttcgctaccgtagcccag

SEQ ID NO: 453 - DNA, 66 bp, Artificial Sequence
  H0
cagaccaccaccagattcaaccagctgaacttctgcggccgcgttactgagcgatggcacagcggc

SEQ ID NO: 454 - DNA, 48 bp, Artificial Sequence
  H2b
gaagttagaaacaccgcaagacaggatcagagaaccaccagctttaac

SEQ ID NO: 455 - DNA, 61 bp, Artificial Sequence
  H10b
  variation 24-25, 27-28, 33-34, 36-37, 48-49: n = a or c or t or g
ccggaccccaagcgtcgaacggmnnmnngtcmnnannacggtcagamnntttacgagcgca

SEQ ID NO: 456 - DNA, 55 bp, Artificial Sequence
  H12b
gccgctgtgccatcgctcagtaacgtcgacgccggagaaacggtaacaacggtac

SEQ ID NO: 457 - protein, 214 aa, Artificial Sequence
  anti-C. albicans 2G12 light chain variant (4F8)
DVVMTQSPSTLSASVGDTITITCRASQSIETWLAWYQQKPGKAPKLLIYKASTLKTGVPSRFSGSGSGTEFTLTISGLQFDDFATYHCQHYKEWRATFGQGTRVEIKRTVAAPSVFIFPPSDEQLKSGTASVVCLLNNFYPREAKVQWKVDNALQSGNSQESVTEQDSKDSTYSLSSTLTLSKADYEKHKVYACEVTHQGLSSPVTKSFNRGEC

SEQ ID NO: 458 - protein, 214 aa, Artificial Sequence
  anti-C. albicans 2G12 light chain variant
DVVMTQSPSTLSASVGDTITITCRASQSIETWLAWYQQKPGKAPKLLIYKASTLKTGVPSRFSGSGSGTEFTLTISGLQFDDFATYHCQHYKEWSATFGQGTRVEIKRTVAAPSVFIFPPSDEQLKSGTASVVCLLNNFYPREAKVQWKVDNALQSGNSQESVTEQDSKDSTYSLSSTLTLSKADYEKHKVYACEVTHQGLSSPVTKSFNRGEC

SEQ ID NO: 459 - protein, 214 aa, Artificial Sequence
  anti-C. albicans 2G12 light chain variant
DVVMTQSPSTLSASVGDTITITCRASQSIETWLAWYQQKPGKAPKLLIYKASTLKTGVPSRFSGSGSGTEFTLTISGLQFDDFATYHCQHYREWSATFGQGTRVEIKRTVAAPSVFIFPPSDEQLKSGTASVVCLLNNFYPREAKVQWKVDNALQSGNSQESVTEQDSKDSTYSLSSTLTLSKADYEKHKVYACEVTHQGLSSPVTKSFNRGEC

SEQ ID NO: 460 - protein, 214 aa, Artificial Sequence
  anti-C. albicans 2G12 light chain variant
DVVMTQSPSTLSASVGDTITITCRASQSIETWLAWYQQKPGKAPKLLIYKASTLKTGVPSRFSGSGSGTEFTLTISGLQFDDFATYHCQHYLAWSATFGQGTRVEIKRTVAAPSVFIFPPSDEQLKSGTASVVCLLNNFYPREAKVQWKVDNALQSGNSQESVTEQDSKDSTYSLSSTLTLSKADYEKHKVYACEVTHQGLSSPVTKSFNRGEC

SEQ ID NO: 461 - protein, 214 aa, Artificial Sequence
  anti-C. albicans 2G12 light chain variant
DVVMTQSPSTLSASVGDTITITCRASQSIETWLAWYQQKPGKAPKLLIYKASTLKTGVPSRFSGSGSGTEFTLTISGLQFDDFATYHCQHYKEWWATFGQGTRVEIKRTVAAPSVFIFPPSDEQLKSGTASVVCLLNNFYPREAKVQWKVDNALQSGNSQESVTEQDSKDSTYSLSSTLTLSKADYEKHKVYACEVTHQGLSSPVTKSFNRGEC

SEQ ID NO: 462 - protein, 214 aa, Artificial Sequence
  anti-C. albicans 2G12 light chain variant
DVVMTQSPSTLSASVGDTITITCRASQSIETWLAWYQQKPGKAPKLLIYKASTLKTGVPSRFSGSGSGTEFTLTISGLQFDDFATYHCQHYREWWATFGQGTRVEIKRTVAAPSVFIFPPSDEQLKSGTASVVCLLNNFYPREAKVQWKVDNALQSGNSQESVTEQDSKDSTYSLSSTLTLSKADYEKHKVYACEVTHQGLSSPVTKSFNRGEC

SEQ ID NO: 463 - protein, 214 aa, Artificial Sequence
  anti-C. albicans 2G12 light chain variant
DVVMTQSPSTLSASVGDTITITCRASQSIETWLAWYQQKPGKAPKLLIYKASTLKTGVPSRFSGSGSGTEFTLTISGLQFDDFATYHCQHYLSWSATFGQGTRVEIKRTVAAPSVFIFPPSDEQLKSGTASVVCLLNNFYPREAKVQWKVDNALQSGNSQESVTEQDSKDSTYSLSSTLTLSKADYEKHKVYACEVTHQGLSSPVTKSFNRGEC

SEQ ID NO: 464 - protein, 214 aa, Artificial Sequence
  anti-C. albicans 2G12 light chain variant
DVVMTQSPSTLSASVGDTITITCRASQSIETWLAWYQQKPGKAPKLLIYKASTLKTGVPSRFSGSGSGTEFTLTISGLQFDDFATYHCQHYKPFNATFGQGTRVEIKRTVAAPSVFIFPPSDEQLKSGTASVVCLLNNFYPREAKVQWKVDNALQSGNSQESVTEQDSKDSTYSLSSTLTLSKADYEKHKVYACEVTHQGLSSPVTKSFNRGEC

SEQ ID NO: 465 - protein, 214 aa, Artificial Sequence
  anti-C. albicans 2G12 light chain variant
DVVMTQSPSTLSASVGDTITITCRASQSIETWLAWYQQKPGKAPKLLIYKASTLKTGVPSRFSGSGSGTEFTLTISGLQFDDFATYHCQHYRPFNATFGQGTRVEIKRTVAAPSVFIFPPSDEQLKSGTASVVCLLNNFYPREAKVQWKVDNALQSGNSQESVTEQDSKDSTYSLSSTLTLSKADYEKHKVYACEVTHQGLSSPVTKSFNRGEC

SEQ ID NO: 466 - protein, 214 aa, Artificial Sequence
  anti-C. albicans 2G12 light chain variant
DVVMTQSPSTLSASVGDTITITCRASQSIETWLAWYQQKPGKAPKLLIYKASTLKTGVPSRFSGSGSGTEFTLTISGLQFDDFATYHCQHYMPFNATFGQGTRVEIKRTVAAPSVFIFPPSDEQLKSGTASVVCLLNNFYPREAKVQWKVDNALQSGNSQESVTEQDSKDSTYSLSSTLTLSKADYEKHKVYACEVTHQGLSSPVTKSFNRGEC

SEQ ID NO: 467 - protein, 214 aa, Artificial Sequence
  anti-C. albicans 2G12 light chain variant
DVVMTQSPSTLSASVGDTITITCRASQSIETWLAWYQQKPGKAPKLLIYKASTLKTGVPSRFSGSGSGTEFTLTISGLQFDDFATYHCQHYQPFNATFGQGTRVEIKRTVAAPSVFIFPPSDEQLKSGTASVVCLLNNFYPREAKVQWKVDNALQSGNSQESVTEQDSKDSTYSLSSTLTLSKADYEKHKVYACEVTHQGLSSPVTKSFNRGEC

SEQ ID NO: 468 - protein, 214 aa, Artificial Sequence
  anti-C. albicans 2G12 light chain variant
DVVMTQSPSTLSASVGDTITITCRASQSIETWLAWYQQKPGKAPKLLIYKASTLKTGVPSRFSGSGSGTEFTLTISGLQFDDFATYHCQHYLPFNATFGQGTRVEIKRTVAAPSVFIFPPSDEQLKSGTASVVCLLNNFYPREAKVQWKVDNALQSGNSQESVTEQDSKDSTYSLSSTLTLSKADYEKHKVYACEVTHQGLSSPVTKSFNRGEC

SEQ ID NO: 469 - protein, 214 aa, Artificial Sequence
  anti-C. albicans 2G12 light chain variant
DVVMTQSPSTLSASVGDTITITCRASQSIETWLAWYQQKPGKAPKLLIYKASTLKTGVPSRFSGSGSGTEFTLTISGLQFDDFATYHCQHYEPFNATFGQGTRVEIKRTVAAPSVFIFPPSDEQLKSGTASVVCLLNNFYPREAKVQWKVDNALQSGNSQESVTEQDSKDSTYSLSSTLTLSKADYEKHKVYACEVTHQGLSSPVTKSFNRGEC

SEQ ID NO: 470 - protein, 214 aa, Artificial Sequence
  anti-C. albicans 2G12 light chain variant
DVVMTQSPSTLSASVGDTITITCRASQSIETWLAWYQQKPGKAPKLLIYKASTLKTGVPSRFSGSGSGTEFTLTISGLQFDDFATYHCQHYKPFEATFGQGTRVEIKRTVAAPSVFIFPPSDEQLKSGTASVVCLLNNFYPREAKVQWKVDNALQSGNSQESVTEQDSKDSTYSLSSTLTLSKADYEKHKVYACEVTHQGLSSPVTKSFNRGEC

SEQ ID NO: 471 - protein, 214 aa, Artificial Sequence
  anti-C. albicans 2G12 light chain variant
DVVMTQSPSTLSASVGDTITITCRASQSIETWLAWYQQKPGKAPKLLIYKASTLKTGVPSRFSGSGSGTEFTLTISGLQFDDFATYHCQHYRPFEATFGQGTRVEIKRTVAAPSVFIFPPSDEQLKSGTASVVCLLNNFYPREAKVQWKVDNALQSGNSQESVTEQDSKDSTYSLSSTLTLSKADYEKHKVYACEVTHQGLSSPVTKSFNRGEC

SEQ ID NO: 472 - protein, 214 aa, Artificial Sequence
  anti-C. albicans 2G12 light chain variant
DVVMTQSPSTLSASVGDTITITCRASQSIETWLAWYQQKPGKAPKLLIYKASTLKTGVPSRFSGSGSGTEFTLTISGLQFDDFATYHCQHYKPFQATFGQGTRVEIKRTVAAPSVFIFPPSDEQLKSGTASVVCLLNNFYPREAKVQWKVDNALQSGNSQESVTEQDSKDSTYSLSSTLTLSKADYEKHKVYACEVTHQGLSSPVTKSFNRGEC

SEQ ID NO: 473 - protein, 214 aa, Artificial Sequence
  anti-C. albicans 2G12 light chain variant
DVVMTQSPSTLSASVGDTITITCRASQSIETWLAWYQQKPGKAPKLLIYKASTLKTGVPSRFSGSGSGTEFTLTISGLQFDDFATYHCQHYRPFQATFGQGTRVEIKRTVAAPSVFIFPPSDEQLKSGTASVVCLLNNFYPREAKVQWKVDNALQSGNSQESVTEQDSKDSTYSLSSTLTLSKADYEKHKVYACEVTHQGLSSPVTKSFNRGEC

SEQ ID NO: 474 - protein, 214 aa, Artificial Sequence
  anti-C. albicans 2G12 light chain variant
DVVMTQSPSTLSASVGDTITITCRASQSIETWLAWYQQKPGKAPKLLIYKASTLKTGVPSRFSGSGSGTEFTLTISGLQFDDFATYHCQHYQPFQATFGQGTRVEIKRTVAAPSVFIFPPSDEQLKSGTASVVCLLNNFYPREAKVQWKVDNALQSGNSQESVTEQDSKDSTYSLSSTLTLSKADYEKHKVYACEVTHQGLSSPVTKSFNRGEC

SEQ ID NO: 475 - protein, 214 aa, Artificial Sequence
  anti-C. albicans 2G12 light chain variant
DVVMTQSPSTLSASVGDTITITCRASQSIETWLAWYQQKPGKAPKLLIYKASTLKTGVPSRFSGSGSGTEFTLTISGLQFDDFATYHCQHYIPFQATFGQGTRVEIKRTVAAPSVFIFPPSDEQLKSGTASVVCLLNNFYPREAKVQWKVDNALQSGNSQESVTEQDSKDSTYSLSSTLTLSKADYEKHKVYACEVTHQGLSSPVTKSFNRGEC

SEQ ID NO: 476 - protein, 214 aa, Artificial Sequence
  anti-C. albicans 2G12 light chain variant
DVVMTQSPSTLSASVGDTITITCRASQSIETWLAWYQQKPGKAPKLLIYKASTLKTGVPSRFSGSGSGTEFTLTISGLQFDDFATYHCQHYKPFSASFGQGTRVEIKRTVAAPSVFIFPPSDEQLKSGTASVVCLLNNFYPREAKVQWKVDNALQSGNSQESVTEQDSKDSTYSLSSTLTLSKADYEKHKVYACEVTHQGLSSPVTKSFNRGEC

SEQ ID NO: 477 - protein, 214 aa, Artificial Sequence
  anti-C. albicans 2G12 light chain variant
DVVMTQSPSTLSASVGDTITITCRASQSIETWLAWYQQKPGKAPKLLIYKASTLKTGVPSRFSGSGSGTEFTLTISGLQFDDFATYHCQHYRPFSATFGQGTRVEIKRTVAAPSVFIFPPSDEQLKSGTASVVCLLNNFYPREAKVQWKVDNALQSGNSQESVTEQDSKDSTYSLSSTLTLSKADYEKHKVYACEVTHQGLSSPVTKSFNRGEC

SEQ ID NO: 478 - protein, 214 aa, Artificial Sequence
  anti-C. albicans 2G12 light chain variant
DVVMTQSPSTLSASVGDTITITCRASQSIETWLAWYQQKPGKAPKLLIYKASTLKTGVPSRFSGSGSGTEFTLTISGLQFDDFATYHCQHYQPFSATFGQGTRVEIKRTVAAPSVFIFPPSDEQLKSGTASVVCLLNNFYPREAKVQWKVDNALQSGNSQESVTEQDSKDSTYSLSSTLTLSKADYEKHKVYACEVTHQGLSSPVTKSFNRGEC

SEQ ID NO: 479 - protein, 214 aa, Artificial Sequence
  anti-C. albicans 2G12 light chain variant
DVVMTQSPSTLSASVGDTITITCRASQSIETWLAWYQQKPGKAPKLLIYKASTLKTGVPSRFSGSGSGTEFTLTISGLQFDDFATYHCQHYVPFSATFGQGTRVEIKRTVAAPSVFIFPPSDEQLKSGTASVVCLLNNFYPREAKVQWKVDNALQSGNSQESVTEQDSKDSTYSLSSTLTLSKADYEKHKVYACEVTHQGLSSPVTKSFNRGEC

SEQ ID NO: 480 - protein, 214 aa, Artificial Sequence
  anti-C. albicans 2G12 light chain variant
DVVMTQSPSTLSASVGDTITITCRASQSIETWLAWYQQKPGKAPKLLIYKASTLKTGVPSRFSGSGSGTEFTLTISGLQFDDFATYHCQHYHPFSATFGQGTRVEIKRTVAAPSVFIFPPSDEQLKSGTASVVCLLNNFYPREAKVQWKVDNALQSGNSQESVTEQDSKDSTYSLSSTLTLSKADYEKHKVYACEVTHQGLSSPVTKSFNRGEC

SEQ ID NO: 481 - protein, 214 aa, Artificial Sequence
  anti-C. albicans 2G12 light chain variant
DVVMTQSPSTLSASVGDTITITCRASQSIETWLAWYQQKPGKAPKLLIYKASTLKTGVPSRFSGSGSGTEFTLTISGLQFDDFATYHCQHYKPFHATFGQGTRVEIKRTVAAPSVFIFPPSDEQLKSGTASVVCLLNNFYPREAKVQWKVDNALQSGNSQESVTEQDSKDSTYSLSSTLTLSKADYEKHKVYACEVTHQGLSSPVTKSFNRGEC

SEQ ID NO: 482 - protein, 214 aa, Artificial Sequence
  anti-C. albicans 2G12 light chain variant
DVVMTQSPSTLSASVGDTITITCRASQSIETWLAWYQQKPGKAPKLLIYKASTLKTGVPSRFSGSGSGTEFTLTISGLQFDDFATYHCQHYRPFHATFGQGTRVEIKRTVAAPSVFIFPPSDEQLKSGTASVVCLLNNFYPREAKVQWKVDNALQSGNSQESVTEQDSKDSTYSLSSTLTLSKADYEKHKVYACEVTHQGLSSPVTKSFNRGEC

SEQ ID NO: 483 - protein, 214 aa, Artificial Sequence
  anti-C. albicans 2G12 light chain variant
DVVMTQSPSTLSASVGDTITITCRASQSIETWLAWYQQKPGKAPKLLIYKASTLKTGVPSRFSGSGSGTEFTLTISGLQFDDFATYHCQHYMPFHATFGQGTRVEIKRTVAAPSVFIFPPSDEQLKSGTASVVCLLNNFYPREAKVQWKVDNALQSGNSQESVTEQDSKDSTYSLSSTLTLSKADYEKHKVYACEVTHQGLSSPVTKSFNRGEC

SEQ ID NO: 484 - protein, 214 aa, Artificial Sequence
  anti-C. albicans 2G12 light chain variant
DVVMTQSPSTLSASVGDTITITCRASQSIETWLAWYQQKPGKAPKLLIYKASTLKTGVPSRFSGSGSGTEFTLTISGLQFDDFATYHCQHYEPFHATFGQGTRVEIKRTVAAPSVFIFPPSDEQLKSGTASVVCLLNNFYPREAKVQWKVDNALQSGNSQESVTEQDSKDSTYSLSSTLTLSKADYEKHKVYACEVTHQGLSSPVTKSFNRGEC

SEQ ID NO: 485 - protein, 214 aa, Artificial Sequence
  anti-C. albicans 2G12 light chain variant
DVVMTQSPSTLSASVGDTITITCRASQSIETWLAWYQQKPGKAPKLLIYKASTLKTGVPSRFSGSGSGTEFTLTISGLQFDDFATYHCQHYKPFRATFGQGTRVEIKRTVAAPSVFIFPPSDEQLKSGTASVVCLLNNFYPREAKVQWKVDNALQSGNSQESVTEQDSKDSTYSLSSTLTLSKADYEKHKVYACEVTHQGLSSPVTKSFNRGEC

SEQ ID NO: 486 - protein, 214 aa, Artificial Sequence
  anti-C. albicans 2G12 light chain variant
DVVMTQSPSTLSASVGDTITITCRASQSIETWLAWYQQKPGKAPKLLIYKASTLKTGVPSRFSGSGSGTEFTLTISGLQFDDFATYHCQHYVPFRATFGQGTRVEIKRTVAAPSVFIFPPSDEQLKSGTASVVCLLNNFYPREAKVQWKVDNALQSGNSQESVTEQDSKDSTYSLSSTLTLSKADYEKHKVYACEVTHQGLSSPVTKSFNRGEC

SEQ ID NO: 487 - protein, 214 aa, Artificial Sequence
  anti-C. albicans 2G12 light chain variant
DVVMTQSPSTLSASVGDTITITCRASQSIETWLAWYQQKPGKAPKLLIYKASTLKTGVPSRFSGSGSGTEFTLTISGLQFDDFATYHCQHYEPFRATFGQGTRVEIKRTVAAPSVFIFPPSDEQLKSGTASVVCLLNNFYPREAKVQWKVDNALQSGNSQESVTEQDSKDSTYSLSSTLTLSKADYEKHKVYACEVTHQGLSSPVTKSFNRGEC

SEQ ID NO: 488 - protein, 214 aa, Artificial Sequence
  anti-C. albicans 2G12 light chain variant
DVVMTQSPSTLSASVGDTITITCRASQSIETWLAWYQQKPGKAPKLLIYKASTLKTGVPSRFSGSGSGTEFTLTISGLQFDDFATYHCQHYKPFAATFGQGTRVEIKRTVAAPSVFIFPPSDEQLKSGTASVVCLLNNFYPREAKVQWKVDNALQSGNSQESVTEQDSKDSTYSLSSTLTLSKADYEKHKVYACEVTHQGLSSPVTKSFNRGEC

SEQ ID NO: 489 - protein, 214 aa, Artificial Sequence
  anti-C. albicans 2G12 light chain variant
DVVMTQSPSTLSASVGDTITITCRASQSIETWLAWYQQKPGKAPKLLIYKASTLKTGVPSRFSGSGSGTEFTLTISGLQFDDFATYHCQHYVPFAATFGQGTRVEIKRTVAAPSVFIFPPSDEQLKSGTASVVCLLNNFYPREAKVQWKVDNALQSGNSQESVTEQDSKDSTYSLSSTLTLSKADYEKHKVYACEVTHQGLSSPVTKSFNRGEC

SEQ ID NO: 490 - protein, 214 aa, Artificial Sequence
  anti-C. albicans 2G12 light chain variant
DVVMTQSPSTLSASVGDTITITCRASQSIETWLAWYQQKPGKAPKLLIYKASTLKTGVPSRFSGSGSGTEFTLTISGLQFDDFATYHCQHYIPFAATFGQGTRVEIKRTVAAPSVFIFPPSDEQLKSGTASVVCLLNNFYPREAKVQWKVDNALQSGNSQESVTEQDSKDSTYSLSSTLTLSKADYEKHKVYACEVTHQGLSSPVTKSFNRGEC

SEQ ID NO: 491 - protein, 214 aa, Artificial Sequence
  anti-C. albicans 2G12 light chain variant
DVVMTQSPSTLSASVGDTITITCRASQSIETWLAWYQQKPGKAPKLLIYKASTLKTGVPSRFSGSGSGTEFTLTISGLQFDDFATYHCQHYKPFDATFGQGTRVEIKRTVAAPSVFIFPPSDEQLKSGTASVVCLLNNFYPREAKVQWKVDNALQSGNSQESVTEQDSKDSTYSLSSTLTLSKADYEKHKVYACEVTHQGLSSPVTKSFNRGEC

SEQ ID NO: 492 - protein, 214 aa, Artificial Sequence
  anti-C. albicans 2G12 light chain variant
DVVMTQSPSTLSASVGDTITITCRASQSIETWLAWYQQKPGKAPKLLIYKASTLKTGVPSRFSGSGSGTEFTLTISGLQFDDFATYHCQHYMPFDATFGQGTRVEIKRTVAAPSVFIFPPSDEQLKSGTASVVCLLNNFYPREAKVQWKVDNALQSGNSQESVTEQDSKDSTYSLSSTLTLSKADYEKHKVYACEVTHQGLSSPVTKSFNRGEC

SEQ ID NO: 493 - protein, 214 aa, Artificial Sequence
  anti-C. albicans 2G12 light chain variant
DVVMTQSPSTLSASVGDTITITCRASQSIETWLAWYQQKPGKAPKLLIYKASTLKTGVPSRFSGSGSGTEFTLTISGLQFDDFATYHCQHYMPFKATFGQGTRVEIKRTVAAPSVFIFPPSDEQLKSGTASVVCLLNNFYPREAKVQWKVDNALQSGNSQESVTEQDSKDSTYSLSSTLTLSKADYEKHKVYACEVTHQGLSSPVTKSFNRGEC

SEQ ID NO: 494 - protein, 214 aa, Artificial Sequence
  anti-C. albicans 2G12 light chain variant
DVVMTQSPSTLSASVGDTITITCRASQSIETWLAWYQQKPGKAPKLLIYKASTLKTGVPSRFSGSGSGTEFTLTISGLQFDDFATYHCQHYMPFTATFGQGTRVEIKRTVAAPSVFIFPPSDEQLKSGTASVVCLLNNFYPREAKVQWKVDNALQSGNSQESVTEQDSKDSTYSLSSTLTLSKADYEKHKVYACEVTHQGLSSPVTKSFNRGEC

SEQ ID NO: 495 - protein, 214 aa, Artificial Sequence
  anti-C. albicans 2G12 light chain variant
DVVMTQSPSTLSASVGDTITITCRASQSIETWLAWYQQKPGKAPKLLIYKASTLKTGVPSRFSGSGSGTEFTLTISGLQFDDFATYHCQHYMPFPATFGQGTRVEIKRTVAAPSVFIFPPSDEQLKSGTASVVCLLNNFYPREAKVQWKVDNALQSGNSQESVTEQDSKDSTYSLSSTLTLSKADYEKHKVYACEVTHQGLSSPVTKSFNRGEC

SEQ ID NO: 496 - protein, 214 aa, Artificial Sequence
  anti-C. albicans 2G12 light chain variant
DVVMTQSPSTLSASVGDTITITCRASQSIETWLAWYQQKPGKAPKLLIYKASTLKTGVPSRFSGSGSGTEFTLTISGLQFDDFATYHCQHYQPFWATFGQGTRVEIKRTVAAPSVFIFPPSDEQLKSGTASVVCLLNNFYPREAKVQWKVDNALQSGNSQESVTEQDSKDSTYSLSSTLTLSKADYEKHKVYACEVTHQGLSSPVTKSFNRGEC

SEQ ID NO: 497 - protein, 214 aa, Artificial Sequence
  anti-C. albicans 2G12 light chain variant
DVVMTQSPSTLSASVGDTITITCRASQSIETWLAWYQQKPGKAPKLLIYKASTLKTGVPSRFSGSGSGTEFTLTISGLQFDDFATYHCQHYSPFWATFGQGTRVEIKRTVAAPSVFIFPPSDEQLKSGTASVVCLLNNFYPREAKVQWKVDNALQSGNSQESVTEQDSKDSTYSLSSTLTLSKADYEKHKVYACEVTHQGLSSPVTKSFNRGEC

SEQ ID NO: 498 - protein, 214 aa, Artificial Sequence
  anti-C. albicans 2G12 light chain variant
DVVMTQSPSTLSASVGDTITITCRASQSIETWLAWYQQKPGKAPKLLIYKASTLKTGVPSRFSGSGSGTEFTLTISGLQFDDFATYHCQHYMPYRASFGQGTRVEIKRTVAAPSVFIFPPSDEQLKSGTASVVCLLNNFYPREAKVQWKVDNALQSGNSQESVTEQDSKDSTYSLSSTLTLSKADYEKHKVYACEVTHQGLSSPVTKSFNRGEC

SEQ ID NO: 499 - protein, 214 aa, Artificial Sequence
  anti-C. albicans 2G12 light chain variant
DVVMTQSPSTLSASVGDTITITCRASQSIETWLAWYQQKPGKAPKLLIYKASTLKTGVPSRFSGSGSGTEFTLTISGLQFDDFATYHCQHYKPYRATFGQGTRVEIKRTVAAPSVFIFPPSDEQLKSGTASVVCLLNNFYPREAKVQWKVDNALQSGNSQESVTEQDSKDSTYSLSSTLTLSKADYEKHKVYACEVTHQGLSSPVTKSFNRGEC

SEQ ID NO: 500 - protein, 214 aa, Artificial Sequence
  anti-C. albicans 2G12 light chain variant
DVVMTQSPSTLSASVGDTITITCRASQSIETWLAWYQQKPGKAPKLLIYKASTLKTGVPSRFSGSGSGTEFTLTISGLQFDDFATYHCQHYMPYRATFGQGTRVEIKRTVAAPSVFIFPPSDEQLKSGTASVVCLLNNFYPREAKVQWKVDNALQSGNSQESVTEQDSKDSTYSLSSTLTLSKADYEKHKVYACEVTHQGLSSPVTKSFNRGEC

SEQ ID NO: 501 - protein, 214 aa, Artificial Sequence
  anti-C. albicans 2G12 light chain variant
DVVMTQSPSTLSASVGDTITITCRASQSIETWLAWYQQKPGKAPKLLIYKASTLKTGVPSRFSGSGSGTEFTLTISGLQFDDFATYHCQHYQPYRATFGQGTRVEIKRTVAAPSVFIFPPSDEQLKSGTASVVCLLNNFYPREAKVQWKVDNALQSGNSQESVTEQDSKDSTYSLSSTLTLSKADYEKHKVYACEVTHQGLSSPVTKSFNRGEC

SEQ ID NO: 502 - protein, 214 aa, Artificial Sequence
  anti-C. albicans 2G12 light chain variant
DVVMTQSPSTLSASVGDTITITCRASQSIETWLAWYQQKPGKAPKLLIYKASTLKTGVPSRFSGSGSGTEFTLTISGLQFDDFATYHCQHYLPYRATFGQGTRVEIKRTVAAPSVFIFPPSDEQLKSGTASVVCLLNNFYPREAKVQWKVDNALQSGNSQESVTEQDSKDSTYSLSSTLTLSKADYEKHKVYACEVTHQGLSSPVTKSFNRGEC

SEQ ID NO: 503 - protein, 214 aa, Artificial Sequence
  anti-C. albicans 2G12 light chain variant
DVVMTQSPSTLSASVGDTITITCRASQSIETWLAWYQQKPGKAPKLLIYKASTLKTGVPSRFSGSGSGTEFTLTISGLQFDDFATYHCQHYEPYRATFGQGTRVEIKRTVAAPSVFIFPPSDEQLKSGTASVVCLLNNFYPREAKVQWKVDNALQSGNSQESVTEQDSKDSTYSLSSTLTLSKADYEKHKVYACEVTHQGLSSPVTKSFNRGEC

SEQ ID NO: 504 - protein, 214 aa, Artificial Sequence
  anti-C. albicans 2G12 light chain variant
DVVMTQSPSTLSASVGDTITITCRASQSIETWLAWYQQKPGKAPKLLIYKASTLKTGVPSRFSGSGSGTEFTLTISGLQFDDFATYHCQHYKPYDATFGQGTRVEIKRTVAAPSVFIFPPSDEQLKSGTASVVCLLNNFYPREAKVQWKVDNALQSGNSQESVTEQDSKDSTYSLSSTLTLSKADYEKHKVYACEVTHQGLSSPVTKSFNRGEC

SEQ ID NO: 505 - protein, 214 aa, Artificial Sequence
  anti-C. albicans 2G12 light chain variant
DVVMTQSPSTLSASVGDTITITCRASQSIETWLAWYQQKPGKAPKLLIYKASTLKTGVPSRFSGSGSGTEFTLTISGLQFDDFATYHCQHYKPYSATFGQGTRVEIKRTVAAPSVFIFPPSDEQLKSGTASVVCLLNNFYPREAKVQWKVDNALQSGNSQESVTEQDSKDSTYSLSSTLTLSKADYEKHKVYACEVTHQGLSSPVTKSFNRGEC

SEQ ID NO: 506 - protein, 214 aa, Artificial Sequence
  anti-C. albicans 2G12 light chain variant
DVVMTQSPSTLSASVGDTITITCRASQSIETWLAWYQQKPGKAPKLLIYKASTLKTGVPSRFSGSGSGTEFTLTISGLQFDDFATYHCQHYQPYVATFGQGTRVEIKRTVAAPSVFIFPPSDEQLKSGTASVVCLLNNFYPREAKVQWKVDNALQSGNSQESVTEQDSKDSTYSLSSTLTLSKADYEKHKVYACEVTHQGLSSPVTKSFNRGEC

SEQ ID NO: 507 - protein, 214 aa, Artificial Sequence
  anti-C. albicans 2G12 light chain variant
DVVMTQSPSTLSASVGDTITITCRASQSIETWLAWYQQKPGKAPKLLIYKASTLKTGVPSRFSGSGSGTEFTLTISGLQFDDFATYHCQHYEPYKATFGQGTRVEIKRTVAAPSVFIFPPSDEQLKSGTASVVCLLNNFYPREAKVQWKVDNALQSGNSQESVTEQDSKDSTYSLSSTLTLSKADYEKHKVYACEVTHQGLSSPVTKSFNRGEC

SEQ ID NO: 508 - protein, 214 aa, Artificial Sequence
  anti-C. albicans 2G12 light chain variant
DVVMTQSPSTLSASVGDTITITCRASQSIETWLAWYQQKPGKAPKLLIYKASTLKTGVPSRFSGSGSGTEFTLTISGLQFDDFATYHCQHYLPYQASFGQGTRVEIKRTVAAPSVFIFPPSDEQLKSGTASVVCLLNNFYPREAKVQWKVDNALQSGNSQESVTEQDSKDSTYSLSSTLTLSKADYEKHKVYACEVTHQGLSSPVTKSFNRGEC

SEQ ID NO: 509 - protein, 215 aa, Artificial Sequence
  anti-C. albicans 2G12 light chain variant
DVVMTQSPSTLSASVGDTITITCRASQSIETWLAWYQQKPGKAPKLLIYKASTLKTGVPSRFSGSGSGTEFTLTISGLQFDDFATYHCQHYRPHTGATFGQGTRVEIKRTVAAPSVFIFPPSDEQLKSGTASVVCLLNNFYPREAKVQWKVDNALQSGNSQESVTEQDSKDSTYSLSSTLTLSKADYEKHKVYACEVTHQGLSSPVTKSFNRGEC

SEQ ID NO: 510 - protein, 215 aa, Artificial Sequence
  anti-C. albicans 2G12 light chain variant
DVVMTQSPSTLSASVGDTITITCRASQSIETWLAWYQQKPGKAPKLLIYKASTLKTGVPSRFSGSGSGTEFTLTISGLQFDDFATYHCQHYTAHDGATFGQGTRVEIKRTVAAPSVFIFPPSDEQLKSGTASVVCLLNNFYPREAKVQWKVDNALQSGNSQESVTEQDSKDSTYSLSSTLTLSKADYEKHKVYACEVTHQGLSSPVTKSFNRGEC

SEQ ID NO: 511 - protein, 215 aa, Artificial Sequence
  anti-C. albicans 2G12 light chain variant
DVVMTQSPSTLSASVGDTITITCRASQSIETWLAWYQQKPGKAPKLLIYKASTLKTGVPSRFSGSGSGTEFTLTISGLQFDDFATYHCQHYTAHRGATFGQGTRVEIKRTVAAPSVFIFPPSDEQLKSGTASVVCLLNNFYPREAKVQWKVDNALQSGNSQESVTEQDSKDSTYSLSSTLTLSKADYEKHKVYACEVTHQGLSSPVTKSFNRGEC

SEQ ID NO: 512 - protein, 215 aa, Artificial Sequence
  anti-C. albicans 2G12 light chain variant
DVVMTQSPSTLSASVGDTITITCRASQSIETWLAWYQQKPGKAPKLLIYKASTLKTGVPSRFSGSGSGTEFTLTISGLQFDDFATYHCQHYRAHTGATFGQGTRVEIKRTVAAPSVFIFPPSDEQLKSGTASVVCLLNNFYPREAKVQWKVDNALQSGNSQESVTEQDSKDSTYSLSSTLTLSKADYEKHKVYACEVTHQGLSSPVTKSFNRGEC

SEQ ID NO: 513 - protein, 215 aa, Artificial Sequence
  anti-C. albicans 2G12 light chain variant
DVVMTQSPSTLSASVGDTITITCRASQSIETWLAWYQQKPGKAPKLLIYKASTLKTGVPSRFSGSGSGTEFTLTISGLQFDDFATYHCQHYTAHTGATFGQGTRVEIKRTVAAPSVFIFPPSDEQLKSGTASVVCLLNNFYPREAKVQWKVDNALQSGNSQESVTEQDSKDSTYSLSSTLTLSKADYEKHKVYACEVTHQGLSSPVTKSFNRGEC

SEQ ID NO: 514 - protein, 215 aa, Artificial Sequence
  anti-C. albicans 2G12 light chain variant
DVVMTQSPSTLSASVGDTITITCRASQSIETWLAWYQQKPGKAPKLLIYKASTLKTGVPSRFSGSGSGTEFTLTISGLQFDDFATYHCQHYTDHHGATFGQGTRVEIKRTVAAPSVFIFPPSDEQLKSGTASVVCLLNNFYPREAKVQWKVDNALQSGNSQESVTEQDSKDSTYSLSSTLTLSKADYEKHKVYACEVTHQGLSSPVTKSFNRGEC

SEQ ID NO: 515 - protein, 215 aa, Artificial Sequence
  anti-C. albicans 2G12 light chain variant
DVVMTQSPSTLSASVGDTITITCRASQSIETWLAWYQQKPGKAPKLLIYKASTLKTGVPSRFSGSGSGTEFTLTISGLQFDDFATYHCQHYTDHKGATFGQGTRVEIKRTVAAPSVFIFPPSDEQLKSGTASVVCLLNNFYPREAKVQWKVDNALQSGNSQESVTEQDSKDSTYSLSSTLTLSKADYEKHKVYACEVTHQGLSSPVTKSFNRGEC

SEQ ID NO: 516 - protein, 215 aa, Artificial Sequence
  anti-C. albicans 2G12 light chain variant
DVVMTQSPSTLSASVGDTITITCRASQSIETWLAWYQQKPGKAPKLLIYKASTLKTGVPSRFSGSGSGTEFTLTISGLQFDDFATYHCQHYTDHRGATFGQGTRVEIKRTVAAPSVFIFPPSDEQLKSGTASVVCLLNNFYPREAKVQWKVDNALQSGNSQESVTEQDSKDSTYSLSSTLTLSKADYEKHKVYACEVTHQGLSSPVTKSFNRGEC

SEQ ID NO: 517 - protein, 215 aa, Artificial Sequence
  anti-C. albicans 2G12 light chain variant
DVVMTQSPSTLSASVGDTITITCRASQSIETWLAWYQQKPGKAPKLLIYKASTLKTGVPSRFSGSGSGTEFTLTISGLQFDDFATYHCQHYTDHYGATFGQGTRVEIKRTVAAPSVFIFPPSDEQLKSGTASVVCLLNNFYPREAKVQWKVDNALQSGNSQESVTEQDSKDSTYSLSSTLTLSKADYEKHKVYACEVTHQGLSSPVTKSFNRGEC

SEQ ID NO: 518 - protein, 214 aa, Artificial Sequence
  anti-C. albicans 2G12 light chain variant
DVVMTQSPSTLSASVGDTITITCRASQSIETWLAWYQQKPGKAPKLLIYKASTLKTGVPSRFSGSGSGTEFTLTISGLQFDDFATYHCQHYREWRATFGQGTRVEIKRTVAAPSVFIFPPSDEQLKSGTASVVCLLNNFYPREAKVQWKVDNALQSGNSQESVTEQDSKDSTYSLSSTLTLSKADYEKHKVYACEVTHQGLSSPVTKSFNRGEC

SEQ ID NO: 519 - protein, 214 aa, Artificial Sequence
  anti-C. albicans 2G12 light chain variant
DVVMTQSPSTLSASVGDTITITCRASQSIETWLAWYQQKPGKAPKLLIYKASTLKTGVPSRFSGSGSGTEFTLTISGLQFDDFATYHCQHYREFNATFGQGTRVEIKRTVAAPSVFIFPPSDEQLKSGTASVVCLLNNFYPREAKVQWKVDNALQSGNSQESVTEQDSKDSTYSLSSTLTLSKADYEKHKVYACEVTHQGLSSPVTKSFNRGEC

SEQ ID NO: 520 - protein, 214 aa, Artificial Sequence
  anti-C. albicans 2G12 light chain variant
DVVMTQSPSTLSASVGDTITITCRASQSIETWLAWYQQKPGKAPKLLIYKASTLKTGVPSRFSGSGSGTEFTLTISGLQFDDFATYHCQHYREFHATFGQGTRVEIKRTVAAPSVFIFPPSDEQLKSGTASVVCLLNNFYPREAKVQWKVDNALQSGNSQESVTEQDSKDSTYSLSSTLTLSKADYEKHKVYACEVTHQGLSSPVTKSFNRGEC

SEQ ID NO: 521 - protein, 214 aa, Artificial Sequence
  anti-C. albicans 2G12 light chain variant
DVVMTQSPSTLSASVGDTITITCRASQSIETWLAWYQQKPGKAPKLLIYKASTLKTGVPSRFSGSGSGTEFTLTISGLQFDDFATYHCQHYRPWSATFGQGTRVEIKRTVAAPSVFIFPPSDEQLKSGTASVVCLLNNFYPREAKVQWKVDNALQSGNSQESVTEQDSKDSTYSLSSTLTLSKADYEKHKVYACEVTHQGLSSPVTKSFNRGEC

SEQ ID NO: 522 - protein, 214 aa, Artificial Sequence
  anti-C. albicans 2G12 Fab light chain variant
DVVMTQSPSTLSASVGDTITITCRASQSIETWLAWYQQKPGKAPKLLIYKASTLKTGVPSRFSGSGSGTEFTLTISGLQFDDFATYHCQHYMPFNASFGQGTRVEIKRTVAAPSVFIFPPSDEQLKSGTASVVCLLNNFYPREAKVQWKVDNALQSGNSQESVTEQDSKDSTYSLSSTLTLSKADYEKHKVYACEVTHQGLSSPVTKSFNRGEC

SEQ ID NO: 523 - protein, 214 aa, Artificial Sequence
  anti-C. albicans 2G12 light chain variant
DVVMTQSPSTLSASVGDTITITCRASQSIETWLAWYQQKPGKAPKLLIYKASTLKTGVPSRFSGSGSGTEFTLTISGLQFDDFATYHCQHYIPFEATFGQGTRVEIKRTVAAPSVFIFPPSDEQLKSGTASVVCLLNNFYPREAKVQWKVDNALQSGNSQESVTEQDSKDSTYSLSSTLTLSKADYEKHKVYACEVTHQGLSSPVTKSFNRGEC

SEQ ID NO: 524 - protein, 214 aa, Artificial Sequence
  anti-C. albicans 2G12 light chain variant
DVVMTQSPSTLSASVGDTITITCRASQSIETWLAWYQQKPGKAPKLLIYKASTLKTGVPSRFSGSGSGTEFTLTISGLQFDDFATYHCQHYLPFQATFGQGTRVEIKRTVAAPSVFIFPPSDEQLKSGTASVVCLLNNFYPREAKVQWKVDNALQSGNSQESVTEQDSKDSTYSLSSTLTLSKADYEKHKVYACEVTHQGLSSPVTKSFNRGEC

SEQ ID NO: 525 - protein, 214 aa, Artificial Sequence
  anti-C. albicans 2G12 light chain variant
DVVMTQSPSTLSASVGDTITITCRASQSIETWLAWYQQKPGKAPKLLIYKASTLKTGVPSRFSGSGSGTEFTLTISGLQFDDFATYHCQHYIPFSATFGQGTRVEIKRTVAAPSVFIFPPSDEQLKSGTASVVCLLNNFYPREAKVQWKVDNALQSGNSQESVTEQDSKDSTYSLSSTLTLSKADYEKHKVYACEVTHQGLSSPVTKSFNRGEC

SEQ ID NO: 526 - protein, 214 aa, Artificial Sequence
  anti-C. albicans 2G12 light chain variant
DVVMTQSPSTLSASVGDTITITCRASQSIETWLAWYQQKPGKAPKLLIYKASTLKTGVPSRFSGSGSGTEFTLTISGLQFDDFATYHCQHYQPFHATFGQGTRVEIKRTVAAPSVFIFPPSDEQLKSGTASVVCLLNNFYPREAKVQWKVDNALQSGNSQESVTEQDSKDSTYSLSSTLTLSKADYEKHKVYACEVTHQGLSSPVTKSFNRGEC

SEQ ID NO: 527 - protein, 214 aa, Artificial Sequence
  anti-C. albicans 2G12 light chain variant
DVVMTQSPSTLSASVGDTITITCRASQSIETWLAWYQQKPGKAPKLLIYKASTLKTGVPSRFSGSGSGTEFTLTISGLQFDDFATYHCQHYQPFRATFGQGTRVEIKRTVAAPSVFIFPPSDEQLKSGTASVVCLLNNFYPREAKVQWKVDNALQSGNSQESVTEQDSKDSTYSLSSTLTLSKADYEKHKVYACEVTHQGLSSPVTKSFNRGEC

SEQ ID NO: 528 - protein, 214 aa, Artificial Sequence
  anti-C. albicans 2G12 light chain variant
DVVMTQSPSTLSASVGDTITITCRASQSIETWLAWYQQKPGKAPKLLIYKASTLKTGVPSRFSGSGSGTEFTLTISGLQFDDFATYHCQHYVPFKATFGQGTRVEIKRTVAAPSVFIFPPSDEQLKSGTASVVCLLNNFYPREAKVQWKVDNALQSGNSQESVTEQDSKDSTYSLSSTLTLSKADYEKHKVYACEVTHQGLSSPVTKSFNRGEC

SEQ ID NO: 529 - protein, 214 aa, Artificial Sequence
  anti-C. albicans 2G12 light chain variant
DVVMTQSPSTLSASVGDTITITCRASQSIETWLAWYQQKPGKAPKLLIYKASTLKTGVPSRFSGSGSGTEFTLTISGLQFDDFATYHCQHYLPFKATFGQGTRVEIKRTVAAPSVFIFPPSDEQLKSGTASVVCLLNNFYPREAKVQWKVDNALQSGNSQESVTEQDSKDSTYSLSSTLTLSKADYEKHKVYACEVTHQGLSSPVTKSFNRGEC

SEQ ID NO: 530 - protein, 214 aa, Artificial Sequence
  anti-C. albicans 2G12 light chain variant
DVVMTQSPSTLSASVGDTITITCRASQSIETWLAWYQQKPGKAPKLLIYKASTLKTGVPSRFSGSGSGTEFTLTISGLQFDDFATYHCQHYKPFWATFGQGTRVEIKRTVAAPSVFIFPPSDEQLKSGTASVVCLLNNFYPREAKVQWKVDNALQSGNSQESVTEQDSKDSTYSLSSTLTLSKADYEKHKVYACEVTHQGLSSPVTKSFNRGEC

SEQ ID NO: 531 - protein, 214 aa, Artificial Sequence
  anti-C. albicans 2G12 light chain variant
DVVMTQSPSTLSASVGDTITITCRASQSIETWLAWYQQKPGKAPKLLIYKASTLKTGVPSRFSGSGSGTEFTLTISGLQFDDFATYHCQHYQPFVATFGQGTRVEIKRTVAAPSVFIFPPSDEQLKSGTASVVCLLNNFYPREAKVQWKVDNALQSGNSQESVTEQDSKDSTYSLSSTLTLSKADYEKHKVYACEVTHQGLSSPVTKSFNRGEC

SEQ ID NO: 532 - protein, 214 aa, Artificial Sequence
  anti-C. albicans 2G12 light chain variant
DVVMTQSPSTLSASVGDTITITCRASQSIETWLAWYQQKPGKAPKLLIYKASTLKTGVPSRFSGSGSGTEFTLTISGLQFDDFATYHCQHYRPWWATFGQGTRVEIKRTVAAPSVFIFPPSDEQLKSGTASVVCLLNNFYPREAKVQWKVDNALQSGNSQESVTEQDSKDSTYSLSSTLTLSKADYEKHKVYACEVTHQGLSSPVTKSFNRGEC

SEQ ID NO: 533 - protein, 214 aa, Artificial Sequence
  anti-C. albicans 2G12 light chain variant
DVVMTQSPSTLSASVGDTITITCRASQSIETWLAWYQQKPGKAPKLLIYKASTLKTGVPSRFSGSGSGTEFTLTISGLQFDDFATYHCQHYLPWWATFGQGTRVEIKRTVAAPSVFIFPPSDEQLKSGTASVVCLLNNFYPREAKVQWKVDNALQSGNSQESVTEQDSKDSTYSLSSTLTLSKADYEKHKVYACEVTHQGLSSPVTKSFNRGEC

SEQ ID NO: 534 - protein, 214 aa, Artificial Sequence
  anti-C. albicans 2G12 light chain variant
DVVMTQSPSTLSASVGDTITITCRASQSIETWLAWYQQKPGKAPKLLIYKASTLKTGVPSRFSGSGSGTEFTLTISGLQFDDFATYHCQHYMPYSATFGQGTRVEIKRTVAAPSVFIFPPSDEQLKSGTASVVCLLNNFYPREAKVQWKVDNALQSGNSQESVTEQDSKDSTYSLSSTLTLSKADYEKHKVYACEVTHQGLSSPVTKSFNRGEC

SEQ ID NO: 535 - protein, 214 aa, Artificial Sequence
  anti-C. albicans 2G12 light chain variant
DVVMTQSPSTLSASVGDTITITCRASQSIETWLAWYQQKPGKAPKLLIYKASTLKTGVPSRFSGSGSGTEFTLTISGLQFDDFATYHCQHYQPYSATFGQGTRVEIKRTVAAPSVFIFPPSDEQLKSGTASVVCLLNNFYPREAKVQWKVDNALQSGNSQESVTEQDSKDSTYSLSSTLTLSKADYEKHKVYACEVTHQGLSSPVTKSFNRGEC

SEQ ID NO: 536 - protein, 214 aa, Artificial Sequence
  anti-C. albicans 2G12 light chain variant
DVVMTQSPSTLSASVGDTITITCRASQSIETWLAWYQQKPGKAPKLLIYKASTLKTGVPSRFSGSGSGTEFTLTISGLQFDDFATYHCQHYEPYVATFGQGTRVEIKRTVAAPSVFIFPPSDEQLKSGTASVVCLLNNFYPREAKVQWKVDNALQSGNSQESVTEQDSKDSTYSLSSTLTLSKADYEKHKVYACEVTHQGLSSPVTKSFNRGEC

SEQ ID NO: 537 - protein, 214 aa, Artificial Sequence
  anti-C. albicans 2G12 light chain variant
DVVMTQSPSTLSASVGDTITITCRASQSIETWLAWYQQKPGKAPKLLIYKASTLKTGVPSRFSGSGSGTEFTLTISGLQFDDFATYHCQHYMPYKATFGQGTRVEIKRTVAAPSVFIFPPSDEQLKSGTASVVCLLNNFYPREAKVQWKVDNALQSGNSQESVTEQDSKDSTYSLSSTLTLSKADYEKHKVYACEVTHQGLSSPVTKSFNRGEC

SEQ ID NO: 538 - protein, 214 aa, Artificial Sequence
  anti-C. albicans 2G12 light chain variant
DVVMTQSPSTLSASVGDTITITCRASQSIETWLAWYQQKPGKAPKLLIYKASTLKTGVPSRFSGSGSGTEFTLTISGLQFDDFATYHCQHYMPYNATFGQGTRVEIKRTVAAPSVFIFPPSDEQLKSGTASVVCLLNNFYPREAKVQWKVDNALQSGNSQESVTEQDSKDSTYSLSSTLTLSKADYEKHKVYACEVTHQGLSSPVTKSFNRGEC

SEQ ID NO: 539 - protein, 214 aa, Artificial Sequence
  anti-C. albicans 2G12 light chain variant
DVVMTQSPSTLSASVGDTITITCRASQSIETWLAWYQQKPGKAPKLLIYKASTLKTGVPSRFSGSGSGTEFTLTISGLQFDDFATYHCQHYQPYNATFGQGTRVEIKRTVAAPSVFIFPPSDEQLKSGTASVVCLLNNFYPREAKVQWKVDNALQSGNSQESVTEQDSKDSTYSLSSTLTLSKADYEKHKVYACEVTHQGLSSPVTKSFNRGEC

SEQ ID NO: 540 - protein, 214 aa, Artificial Sequence
  anti-C. albicans 2G12 light chain variant
DVVMTQSPSTLSASVGDTITITCRASQSIETWLAWYQQKPGKAPKLLIYKASTLKTGVPSRFSGSGSGTEFTLTISGLQFDDFATYHCQHYLPYNASFGQGTRVEIKRTVAAPSVFIFPPSDEQLKSGTASVVCLLNNFYPREAKVQWKVDNALQSGNSQESVTEQDSKDSTYSLSSTLTLSKADYEKHKVYACEVTHQGLSSPVTKSFNRGEC

SEQ ID NO: 541 - protein, 214 aa, Artificial Sequence
  anti-C. albicans 2G12 light chain variant
DVVMTQSPSTLSASVGDTITITCRASQSIETWLAWYQQKPGKAPKLLIYKASTLKTGVPSRFSGSGSGTEFTLTISGLQFDDFATYHCQHYSPYWATFGQGTRVEIKRTVAAPSVFIFPPSDEQLKSGTASVVCLLNNFYPREAKVQWKVDNALQSGNSQESVTEQDSKDSTYSLSSTLTLSKADYEKHKVYACEVTHQGLSSPVTKSFNRGEC

SEQ ID NO: 542 - protein, 214 aa, Artificial Sequence
  anti-C. albicans 2G12 light chain variant
DVVMTQSPSTLSASVGDTITITCRASQSIETWLAWYQQKPGKAPKLLIYKASTLKTGVPSRFSGSGSGTEFTLTISGLQFDDFATYHCQHYLPYEASFGQGTRVEIKRTVAAPSVFIFPPSDEQLKSGTASVVCLLNNFYPREAKVQWKVDNALQSGNSQESVTEQDSKDSTYSLSSTLTLSKADYEKHKVYACEVTHQGLSSPVTKSFNRGEC

SEQ ID NO: 543 - protein, 214 aa, Artificial Sequence
  anti-C. albicans 2G12 light chain variant
DVVMTQSPSTLSASVGDTITITCRASQSIETWLAWYQQKPGKAPKLLIYKASTLKTGVPSRFSGSGSGTEFTLTISGLQFDDFATYHCQHYEPYLATFGQGTRVEIKRTVAAPSVFIFPPSDEQLKSGTASVVCLLNNFYPREAKVQWKVDNALQSGNSQESVTEQDSKDSTYSLSSTLTLSKADYEKHKVYACEVTHQGLSSPVTKSFNRGEC

SEQ ID NO: 544 - protein, 214 aa, Artificial Sequence
  anti-C. albicans 2G12 light chain variant
DVVMTQSPSTLSASVGDTITITCRASQSIETWLAWYQQKPGKAPKLLIYKASTLKTGVPSRFSGSGSGTEFTLTISGLQFDDFATYHCQHYLPFGASFGQGTRVEIKRTVAAPSVFIFPPSDEQLKSGTASVVCLLNNFYPREAKVQWKVDNALQSGNSQESVTEQDSKDSTYSLSSTLTLSKADYEKHKVYACEVTHQGLSSPVTKSFNRGEC

SEQ ID NO: 545 - protein, 214 aa, Artificial Sequence
  anti-C. albicans 2G12 light chain variant
DVVMTQSPSTLSASVGDTITITCRASQSIETWLAWYQQKPGKAPKLLIYKASTLKTGVPSRFSGSGSGTEFTLTISGLQFDDFATYHCQHYKDFSATFGQGTRVEIKRTVAAPSVFIFPPSDEQLKSGTASVVCLLNNFYPREAKVQWKVDNALQSGNSQESVTEQDSKDSTYSLSSTLTLSKADYEKHKVYACEVTHQGLSSPVTKSFNRGEC

SEQ ID NO: 546 - protein, 214 aa, Artificial Sequence
  anti-C. albicans 2G12 light chain variant
DVVMTQSPSTLSASVGDTITITCRASQSIETWLAWYQQKPGKAPKLLIYKASTLKTGVPSRFSGSGSGTEFTLTISGLQFDDFATYHCQHYMAYQATFGQGTRVEIKRTVAAPSVFIFPPSDEQLKSGTASVVCLLNNFYPREAKVQWKVDNALQSGNSQESVTEQDSKDSTYSLSSTLTLSKADYEKHKVYACEVTHQGLSSPVTKSFNRGEC

SEQ ID NO: 547 - protein, 214 aa, Artificial Sequence
  anti-C. albicans 2G12 light chain variant
DVVMTQSPSTLSASVGDTITITCRASQSIETWLAWYQQKPGKAPKLLIYKASTLKTGVPSRFSGSGSGTEFTLTISGLQFDDFATYHCQHYQAFNATFGQGTRVEIKRTVAAPSVFIFPPSDEQLKSGTASVVCLLNNFYPREAKVQWKVDNALQSGNSQESVTEQDSKDSTYSLSSTLTLSKADYEKHKVYACEVTHQGLSSPVTKSFNRGEC

SEQ ID NO: 548 - protein, 214 aa, Artificial Sequence
  anti-C. albicans 2G12 light chain variant
DVVMTQSPSTLSASVGDTITITCRASQSIETWLAWYQQKPGKAPKLLIYKASTLKTGVPSRFSGSGSGTEFTLTISGLQFDDFATYHCNPLSGYSATFGQGTRVEIKRTVAAPSVFIFPPSDEQLKSGTASVVCLLNNFYPREAKVQWKVDNALQSGNSQESVTEQDSKDSTYSLSSTLTLSKADYEKHKVYACEVTHQGLSSPVTKSFNRGEC

SEQ ID NO: 549 - protein, 214 aa, Artificial Sequence
  anti-C. albicans 2G12 light chain variant
DVVMTQSPSTLSASVGDTITITCRASQSIETWLAWYQQKPGKAPKLLIYKASTLKTGVPSRFSGSGSGTEFTLTISGLQFDDFATYHCQHYKPFSATFGQGTRVEIKRTVAAPSVFIFPPSDEQLKSGTASVVCLLNNFYPREAKVQWKVDNALQSGNSQESVTEQDSKDSTYSLSSTLTLSKADYEKHKVYACEVTHQGLSSPVTKSFNRGEC

SEQ ID NO: 550 - protein, 214 aa, Artificial Sequence
  anti-C. albicans 2G12 light chain variant
DVVMTQSPSTLSASVGDTITITCRASQSIETWLAWYQQKPGKAPKLLIYKASTLKTGVPSRFSGSGSGTEFTLTISGLQFDDFATYHCQHYMPFRATFGQGTRVEIKRTVAAPSVFIFPPSDEQLKSGTASVVCLLNNFYPREAKVQWKVDNALQSGNSQESVTEQDSKDSTYSLSSTLTLSKADYEKHKVYACEVTHQGLSSPVTKSFNRGEC

SEQ ID NO: 551 - DNA, 5882 bp, Artificial Sequence
  2G12 Fab pCAL IT* Sac I
gtggcacttttcggggaaatgtgcgcggaacccctatttgtttatttttctaaatacattcaaatatgtatccgctcatgagacaataaccctgataaatgcttcaataatattgaaaaaggaagagtatgagtattcaacatttccgtgtcgcccttattcccttttttgcggcattttgccttcctgtttttgctcacccagaaacgctggtgaaagtaaaagatgctgaagatcagttgggtgcacgagtgggttacatcgaactggatctcaacagcggtaagatccttgagagttttcgccccgaagaacgttttccaatgatgagcacttttaaagttctgctatgtggcgcggtattatcccgtattgacgccgggcaagagcaactcggtcgccgcatacactattctcagaatgacttggttgagtactcaccagtcacagaaaagcatcttacggatggcatgacagtaagagaattatgcagtgctgccataaccatgagtgataacactgcggccaacttacttctgacaacgatcggaggaccgaaggagctaaccgcttttttgcacaacatgggggatcatgtaactcgccttgatcgttgggaaccggagctgaatgaagccataccaaacgacgagcgtgacaccacgatgcctgtagcaatggcaacaacgttgcgcaaactattaactggcgaactacttactctagcttcccggcaacaattaatagactggatggaggcggataaagttgcaggaccacttctgcgctcggcccttccggctggctggtttattgctgataaatctggagccggtgagcgtgggtctcgcggtatcattgcagcactggggccagatggtaagccctcccgtatcgtagttatctacacgacggggagtcaggcaactatggatgaacgaaatagacagatcgctgagataggtgcctcactgattaagcattggtaactgtcagaccaagtttactcatatatactttagattgatttaaaacttcatttttaatttaaaaggatctaggtgaagatcctttttgataatctcatgaccaaaatcccttaacgtgagttttcgttccactgagcgtcagaccccgtagaaaagatcaaaggatcttcttgagatcctttttttctgcgcgtaatctgctgcttgcaaacaaaaaaaccaccgctaccagcggtggtttgtttgccggatcaagagctaccaactctttttccgaaggtaactggcttcagcagagcgcagataccaaatactgtccttctagtgtagccgtagttaggccaccacttcaagaactctgtagcaccgcctacatacctcgctctgctaatcctgttaccagtggctgctgccagtggcgataagtcgtgtcttaccgggttggactcaagacgatagttaccggataaggcgcagcggtcgggctgaacggggggttcgtgcacacagcccagcttggagcgaacgacctacaccgaactgagatacctacagcgtgagctatgagaaagcgccacgcttcccgaagggagaaaggcggacaggtatccggtaagcggcagggtcggaacaggagagcgcacgagggagcttccagggggaaacgcctggtatctttatagtcctgtcgggtttcgccacctctgacttgagcgtcgatttttgtgatgctcgtcaggggggcggagcctatggaaaaacgccagcaacgcggcctttttacggttcctggccttttgctggccttttgctcacatgttctttcctgcgttatcccctgattctgtggataaccgtattaccgcctttgagtgagctgataccgctcgccgcagccgaacgaccgagcgcagcgagtcagtgagcgaggaagcgacaccatcgaatggcgcaaaacctttcgcggtatggcatgatagcgcccggaagagagtcaattcagggtggtgaatgtgaaaccagtaacgttatacgatgtcgcagagtatgccggtgtctcttatcagaccgtttcccgcgtggtgaaccaggccagccacgtttctgcgaaaacgcgggaaaaagtggaagcggcgatggcggagctgaattacattcccaaccgcgtggcacaacaactggcgggcaaacagtcgttgctgattggcgttgccacctccagtctggccctgcacgcgccgtcgcaaattgtcgcggcgattaaatctcgcgccgatcaactgggtgccagcgtggtggtgtcgatggtagaacgaagcggcgtcgaagcctgtaaagcggcggtgcacaatcttctcgcgcaacgcgtcagtgggctgatcattaactatccgctggatgaccaggatgccattgctgtggaagctgcctgcactaatgttccggcgttatttcttgatgtctctgaccagacacccatcaacagtattattttctcccatgaagacggtacgcgactgggcgtggagcatctggtcgcattgggtcaccagcaaatcgcgctgttagcgggcccattaagttctgtctcggcgcgtctgcgtctggctggctggcataaatatctcactcgcaatcaaattcagccgatagcggaacgggaaggcgactggagtgccatgtccggttttcaacaaaccatgcaaatgctgaatgagggcatcgttcccactgcgatgctggttgccaacgatcagatggcgctgggcgcaatgcgcgccattaccgagtccgggctgcgcgttggtgcggatatctcggtagtgggatacgacgataccgaagacagctcatgttatatcccgccgttaaccaccatcaaacaggattttcgcctgctggggcaaaccagcgtggaccgcttgctgcaactctctcagggccaggcggtgaagggcaatcagctgttgcccgtctcactggtgaaaagaaaaaccaccctggcgcccaatacgcaaaccgcctctccccgcgcgttggccgattcattaatgcagctggcacgacaggtttcccgactggaaagcgggcagtgagcggtacccgataaaagcggcttcctgacaggaggccgttttgttttgcagcccacctcaacgcaattaatgtgagttagctcactcattaggcaccccaggctttacactttatgcttccggctcgtatgttgtgtggaattgtgagcggataacaattgaattaaggaggatataattatgaaatacctgctgccgaccgcagccgctggtctgctgctgctcgcggcctagccggccatggccgccggtgttgttatgacccagtctccgtctaccctgtctgcttctgttggtgacaccatcaccatcacctgccgtgcttctcagtctatcgaaacctggctggcttggtaccagcagaaaccgggtaaagctccgaaactgctgatctacaaggcttctaccctgaaaaccggtgttccgtctcgtttctctggttctggttctggtaccgagttcaccctgaccatctctggtctgcagttcgacgacttcgctacctaccactgccagcactacgctggttactctgctaccttcggtcagggtacccgtgttgaaatcaaacgtaccgttgctgctccgtctgttttcatcttcccgccgtctgacgaacagctgaaatctggtaccgcttctgttgtttgcctgctgaacaacttctacccgcgtgaagctaaagttcagtggaaagttgacaacgctctgcagtctggtaactctcaggaatctgttaccgaacaggactctaaagactctacctactctctgtcttctaccctgaccctgtctaaagctgactacgaaaagcacaaagtttacgcttgcgaagttacccaccagggtctgagctctccggttaccaaatctttcaaccgtggtgaatgctaattaattaataaggaggatataattatgaaaaagacagctatcgcgattgcagtggcactggctggtttcgctaccgtagcctaggcggccgcagaagttcagctggttgaatctggtggtggtctggttaaagctggtggttctctgatcctgtcttgcggtgtttctaacttccgtatctctgctcacaccatgaactgggttcgtcgtgttccgggtggtggtctggaatgggttgcttctatctctacctcttctacctaccgtgactacgctgacgctgttaaaggtcgtttcaccgtttctcgtgacgacctggaagacttcgtttacctgcagatgcataaaatgcgtgttgaagacaccgctatctactactgcgctcgtaaaggttctgaccgtctgtctgacaacgacccgttcgacgcttggggtccgggtaccgttgttaccgtttctccggcgtcgaccaaaggtccgtctgttttcccgctggctccgtcttctaaatctacctctggtggtaccgctgctctgggttgcctggttaaagactacttcccggaaccggttaccgtttcttggaactctggtgctctgacctctggtgttcacaccttcccggctgttctgcagtcttctggtctgtactctctgtcttctgttgttaccgttccgtcttcttctctgggtacccagacctacatctgcaacgttaaccacaaaccgtctaacaccaaagttgacaagaaagttgaaccgaaatcttgcctgcgatcgcggccaggccggccgcaccatcaccatcaccatggcgcatacccgtacgacgttccggactacgcttctactagttaggagggtggtggctctgagggtggcggttctgagggtggcggctctgagggaggcggttccggtggtggctctggttccggtgattttgattatgaaaagatggcaaacgctaataagggggctatgaccgaaaatgccgatgaaaacgcgctacagtctgacgctaaaggcaaacttgattctgtcgctactgattacggtgctgctatcgatggtttcattggtgacgtttccggccttgctaatggtaatggtgctactggtgattttgctggctctaattcccaaatggctcaagtcggtgacggtgataattcacctttaatgaataatttccgtcaatatttaccttccctccctcaatcggttgaatgtcgcccttttgtctttggcgctggtaaaccatatgaattttctattgattgtgacaaaataaacttattccgtggtgtctttgcgtttcttttatatgttgccacctttatgtatgtattttctacgtttgctaacatactgcgtaataaggagtcttaagctagctaacgatcgcccttcccaacagttgcgcagcctgaatggcgaatgggacgcgccctgtagcggcgcattaagcgcggcgggtgtggtggttacgcgcagcgtgaccgctacacttgccagcgccctagcgcccgctcctttcgctttcttcccttcctttctcgccacgttcgccggctttccccgtcaagctctaaatcgggggctccctttagggttccgatttagtgctttacggcacctcgaccccaaaaaacttgattagggtgatggttcacgtagtgggccatcgccctgatagacggtttttcgccctttgacgttggagtccacgttctttaatagtggactcttgttccaaactggaacaacactcaaccctatctcggtctattcttttgatttataagggattttgccgatttcggcctattggttaaaaaatgagctgatttaacaaaaatttaacgcgaattttaacaaaatattaacgcttacaatttag

SEQ ID NO: 552 - DNA, 5882 bp, Artificial Sequence
  2G12 SapI 3Ala LC pCAL IT* vector
gtggcacttttcggggaaatgtgcgcggaacccctatttgtttatttttctaaatacattcaaatatgtatccgctcatgagacaataaccctgataaatgcttcaataatattgaaaaaggaagagtatgagtattcaacatttccgtgtcgcccttattcccttttttgcggcattttgccttcctgtttttgctcacccagaaacgctggtgaaagtaaaagatgctgaagatcagttgggtgcacgagtgggttacatcgaactggatctcaacagcggtaagatccttgagagttttcgccccgaagaacgttttccaatgatgagcacttttaaagttctgctatgtggcgcggtattatcccgtattgacgccgggcaagagcaactcggtcgccgcatacactattctcagaatgacttggttgagtactcaccagtcacagaaaagcatcttacggatggcatgacagtaagagaattatgcagtgctgccataaccatgagtgataacactgcggccaacttacttctgacaacgatcggaggaccgaaggagctaaccgcttttttgcacaacatgggggatcatgtaactcgccttgatcgttgggaaccggagctgaatgaagccataccaaacgacgagcgtgacaccacgatgcctgtagcaatggcaacaacgttgcgcaaactattaactggcgaactacttactctagcttcccggcaacaattaatagactggatggaggcggataaagttgcaggaccacttctgcgctcggcccttccggctggctggtttattgctgataaatctggagccggtgagcgtgggtctcgcggtatcattgcagcactggggccagatggtaagccctcccgtatcgtagttatctacacgacggggagtcaggcaactatggatgaacgaaatagacagatcgctgagataggtgcctcactgattaagcattggtaactgtcagaccaagtttactcatatatactttagattgatttaaaacttcatttttaatttaaaaggatctaggtgaagatcctttttgataatctcatgaccaaaatcccttaacgtgagttttcgttccactgagcgtcagaccccgtagaaaagatcaaaggatcttcttgagatcctttttttctgcgcgtaatctgctgcttgcaaacaaaaaaaccaccgctaccagcggtggtttgtttgccggatcaagagctaccaactctttttccgaaggtaactggcttcagcagagcgcagataccaaatactgtccttctagtgtagccgtagttaggccaccacttcaagaactctgtagcaccgcctacatacctcgctctgctaatcctgttaccagtggctgctgccagtggcgataagtcgtgtcttaccgggttggactcaagacgatagttaccggataaggcgcagcggtcgggctgaacggggggttcgtgcacacagcccagcttggagcgaacgacctacaccgaactgagatacctacagcgtgagctatgagaaagcgccacgcttcccgaagggagaaaggcggacaggtatccggtaagcggcagggtcggaacaggagagcgcacgagggagcttccagggggaaacgcctggtatctttatagtcctgtcgggtttcgccacctctgacttgagcgtcgatttttgtgatgctcgtcaggggggcggagcctatggaaaaacgccagcaacgcggcctttttacggttcctggccttttgctggccttttgctcacatgttctttcctgcgttatcccctgattctgtggataaccgtattaccgcctttgagtgagctgataccgctcgccgcagccgaacgaccgagcgcagcgagtcagtgagcgaggaagcgacaccatcgaatggcgcaaaacctttcgcggtatggcatgatagcgcccggaagagagtcaattcagggtggtgaatgtgaaaccagtaacgttatacgatgtcgcagagtatgccggtgtctcttatcagaccgtttcccgcgtggtgaaccaggccagccacgtttctgcgaaaacgcgggaaaaagtggaagcggcgatggcggagctgaattacattcccaaccgcgtggcacaacaactggcgggcaaacagtcgttgctgattggcgttgccacctccagtctggccctgcacgcgccgtcgcaaattgtcgcggcgattaaatctcgcgccgatcaactgggtgccagcgtggtggtgtcgatggtagaacgaagcggcgtcgaagcctgtaaagcggcggtgcacaatcttctcgcgcaacgcgtcagtgggctgatcattaactatccgctggatgaccaggatgccattgctgtggaagctgcctgcactaatgttccggcgttatttcttgatgtctctgaccagacacccatcaacagtattattttctcccatgaagacggtacgcgactgggcgtggagcatctggtcgcattgggtcaccagcaaatcgcgctgttagcgggcccattaagttctgtctcggcgcgtctgcgtctggctggctggcataaatatctcactcgcaatcaaattcagccgatagcggaacgggaaggcgactggagtgccatgtccggttttcaacaaaccatgcaaatgctgaatgagggcatcgttcccactgcgatgctggttgccaacgatcagatggcgctgggcgcaatgcgcgccattaccgagtccgggctgcgcgttggtgcggatatctcggtagtgggatacgacgataccgaagacagctcatgttatatcccgccgttaaccaccatcaaacaggattttcgcctgctggggcaaaccagcgtggaccgcttgctgcaactctctcagggccaggcggtgaagggcaatcagctgttgcccgtctcactggtgaaaagaaaaaccaccctggcgcccaatacgcaaaccgcctctccccgcgcgttggccgattcattaatgcagctggcacgacaggtttcccgactggaaagcgggcagtgagcggtacccgataaaagcggcttcctgacaggaggccgttttgttttgcagcccacctcaacgcaattaatgtgagttagctcactcattaggcaccccaggctttacactttatgcttccggctcgtatgttgtgtggaattgtgagcggataacaattgaattaaggaggatataattatgaaatacctgctgccgaccgcagccgctggtctgctgctgctcgcggcctagccggccatggccgccggtgttgttatgacccagtctccgtctaccctgtctgcttctgttggtgacaccatcaccatcacctgccgtgcttctcagtctatcgaaacctggctggcttggtaccagcagaaaccgggtaaagctccgaaactgctgatctacaaggcttctaccctgaaaaccggtgttccgtctcgtttctctggttctggttctggtaccgagttcaccctgaccatctctggtctgcagttcgacgacttcgctagaagagcctgccagcacgccgcgggtgcggccgcgaccttcggctcttctacccgtgttgaaatcaaacgtaccgttgctgctccgtctgttttcatcttcccgccgtctgacgaacagctgaaatctggtaccgcttctgttgtttgcctgctgaacaacttctacccgcgtgaagctaaagttcagtggaaagttgacaacgctctgcagtctggtaactctcaggaatctgttaccgaacaggactctaaagactctacctactctctgtcttctaccctgaccctgtctaaagctgactacgaaaagcacaaagtttacgcttgcgaagttacccaccagggtctgtcttctccggttaccaaatctttcaaccgtggtgaatgctaattaattaataaggaggatataattatgaaaaagacagctatcgcgattgcagtggcactggctggtttcgctaccgtagcctaggcggccgcagaagttcagctggttgaatctggtggtggtctggttaaagctggtggttctctgatcctgtcttgcggtgtttctaacttccgtatctctgctcacaccatgaactgggttcgtcgtgttccgggtggtggtctggaatgggttgcttctatctctacctcttctacctaccgtgactacgctgacgctgttaaaggtcgtttcaccgtttctcgtgacgacctggaagacttcgtttacctgcagatgcataaaatgcgtgttgaagacaccgctatctactactgcgctcgtaaaggttctgaccgtctgtctgacaacgacccgttcgacgcttggggtccgggtaccgttgttaccgtttctccggcgtcgaccaaaggtccgtctgttttcccgctggctccgtcttctaaatctacctctggtggtaccgctgctctgggttgcctggttaaagactacttcccggaaccggttaccgtttcttggaactctggtgctctgacctctggtgttcacaccttcccggctgttctgcagtcttctggtctgtactctctgtcttctgttgttaccgttccgtcttcttctctgggtacccagacctacatctgcaacgttaaccacaaaccgtctaacaccaaagttgacaagaaagttgaaccgaaatcttgcctgcgatcgcggccaggccggccgcaccatcaccatcaccatggcgcatacccgtacgacgttccggactacgcttctactagttaggagggtggtggctctgagggtggcggttctgagggtggcggctctgagggaggcggttccggtggtggctctggttccggtgattttgattatgaaaagatggcaaacgctaataagggggctatgaccgaaaatgccgatgaaaacgcgctacagtctgacgctaaaggcaaacttgattctgtcgctactgattacggtgctgctatcgatggtttcattggtgacgtttccggccttgctaatggtaatggtgctactggtgattttgctggctctaattcccaaatggctcaagtcggtgacggtgataattcacctttaatgaataatttccgtcaatatttaccttccctccctcaatcggttgaatgtcgcccttttgtctttggcgctggtaaaccatatgaattttctattgattgtgacaaaataaacttattccgtggtgtctttgcgtttcttttatatgttgccacctttatgtatgtattttctacgtttgctaacatactgcgtaataaggagtcttaagctagctaacgatcgcccttcccaacagttgcgcagcctgaatggcgaatgggacgcgccctgtagcggcgcattaagcgcggcgggtgtggtggttacgcgcagcgtgaccgctacacttgccagcgccctagcgcccgctcctttcgctttcttcccttcctttctcgccacgttcgccggctttccccgtcaagctctaaatcgggggctccctttagggttccgatttagtgctttacggcacctcgaccccaaaaaacttgattagggtgatggttcacgtagtgggccatcgccctgatagacggtttttcgccctttgacgttggagtccacgttctttaatagtggactcttgttccaaactggaacaacactcaaccctatctcggtctattcttttgatttataagggattttgccgatttcggcctattggttaaaaaatgagctgatttaacaaaaatttaacgcgaattttaacaaaatattaacgcttacaatttag

SEQ ID NO: 553 - protein, 214 aa, Artificial Sequence
  DIQ 2G12 Light Chain
DIQMTQSPSTLSASVGDTITITCRASQSIETWLAWYQQKPGKAPKLLIYKASTLKTGVPSRFSGSGSGTEFTLTISGLQFDDFATYHCQHYAGYSATFGQGTRVEIKRTVAAPSVFIFPPSDEQLKSGTASVVCLLNNFYPREAKVQWKVDNALQSGNSQESVTEQDSKDSTYSLSSTLTLSKADYEKHKVYACEVTHQGLSSPVTKSFNRGEC

SEQ ID NO: 554 - protein, 9 aa, Artificial Sequence
  2G12 light chain variant
QHYDGRAST

SEQ ID NO: 555 - protein, 9 aa, Artificial Sequence
  2G12 light chain variant
QHYNGRTTT

SEQ ID NO: 556 - protein, 9 aa, Artificial Sequence
  2G12 light chain variant
QHYDGRAST

SEQ ID NO: 557 - protein, 9 aa, Artificial Sequence
  2G12 light chain variant
QHYSGYEAT

SEQ ID NO: 558 - protein, 9 aa, Artificial Sequence
  2G12 light chain variant
QHYAGYDAT

SEQ ID NO: 559 - protein, 9 aa, Artificial Sequence
  2G12 light chain variant
QHYAGYHAT

SEQ ID NO: 560 - protein, 9 aa, Artificial Sequence
  2G12 light chain variant
QHYDGRIAT

SEQ ID NO: 561 - protein, 9 aa, Artificial Sequence
  2G12 light chain variant
QHYEGRDAT

SEQ ID NO: 562 - protein, 9 aa, Artificial Sequence
  2G12 light chain variant
QHYDGRHST

SEQ ID NO: 563 - protein, 9 aa, Artificial Sequence
  2G12 light chain variant
QHHTGRSAT

SEQ ID NO: 564 - protein, 9 aa, Artificial Sequence
  2G12 light chain variant
QHYTGNEAT

SEQ ID NO: 565 - protein, 9 aa, Artificial Sequence
  2G12 light chain variant
QHYTGFAAT

SEQ ID NO: 566 - protein, 9 aa, Artificial Sequence
  2G12 light chain variant
QHYDGRHAT

SEQ ID NO: 567 - protein, 9 aa, Artificial Sequence
  2G12 light chain variant
QHYTGSHST

SEQ ID NO: 568 - protein, 9 aa, Artificial Sequence
  2G12 light chain variant
QHYTGVAST

SEQ ID NO: 569 - protein, 9 aa, Artificial Sequence
  2G12 light chain variant
QHYEGQKST

SEQ ID NO: 570 - protein, 9 aa, Artificial Sequence
  2G12 light chain variant
QHYNGYRST

SEQ ID NO: 571 - protein, 9 aa, Artificial Sequence
  2G12 light chain variant
QHYTGRETT

SEQ ID NO: 572 - protein, 9 aa, Artificial Sequence
  2G12 light chain variant
QHYSGRLAT

SEQ ID NO: 573 - protein, 9 aa, Artificial Sequence
  2G12 light chain variant
QHYSGLKST

SEQ ID NO: 574 - protein, 9 aa, Artificial Sequence
  2G12 light chain variant
QHYHGRVAT

SEQ ID NO: 575 - protein, 9 aa, Artificial Sequence
  2G12 light chain variant
QHYNGATST

SEQ ID NO: 576 - protein, 9 aa, Artificial Sequence
  2G12 light chain variant
QHYTGTRST

SEQ ID NO: 577 - protein, 9 aa, Artificial Sequence
  2G12 light chain variant
QHYSGTSST

SEQ ID NO: 578 - protein, 9 aa, Artificial Sequence
  2G12 light chain variant
QHYTGSAST

SEQ ID NO: 579 - protein, 9 aa, Artificial Sequence
  2G12 light chain variant
QHYDGMTST

SEQ ID NO: 580 - protein, 9 aa, Artificial Sequence
  2G12 light chain variant
QHYTGMRTT

SEQ ID NO: 581 - protein, 9 aa, Artificial Sequence
  2G12 light chain variant
QHYEGRTST

SEQ ID NO: 582 - protein, 9 aa, Artificial Sequence
  2G12 light chain variant
QHYTGREST

SEQ ID NO: 583 - protein, 9 aa, Artificial Sequence
  2G12 light chain variant
QHYLGRSST

SEQ ID NO: 584 - protein, 9 aa, Artificial Sequence
  2G12 light chain variant
QHYTGESCT

SEQ ID NO: 585 - protein, 9 aa, Artificial Sequence
  2G12 light chain variant
QHYSGRSST

SEQ ID NO: 586 - protein, 9 aa, Artificial Sequence
  2G12 light chain variant
QHYTGRAST

SEQ ID NO: 587 - protein, 9 aa, Artificial Sequence
  2G12 light chain variant
QHYEGRGAT

SEQ ID NO: 588 - protein, 9 aa, Artificial Sequence
  2G12 light chain variant
QHYSGRSAT

SEQ ID NO: 589 - protein, 9 aa, Artificial Sequence
  2G12 light chain variant
QHYTGMFAT

SEQ ID NO: 590 - protein, 9 aa, Artificial Sequence
  2G12 light chain variant
QHYSGVNST

SEQ ID NO: 591 - protein, 9 aa, Artificial Sequence
  2G12 light chain variant
QHYLGQRTT

SEQ ID NO: 592 - protein, 9 aa, Artificial Sequence
  2G12 light chain variant
QHYTGMLNT

SEQ ID NO: 593 - protein, 9 aa, Artificial Sequence
  2G12 light chain variant
QHYDGNEST

SEQ ID NO: 594 - protein, 9 aa, Artificial Sequence
  2G12 light chain variant
QHREGVYST

SEQ ID NO: 595 - protein, 215 aa, Artificial Sequence
  2G12 light chain variant
AGVVMTQSPSTLSASVGDTITITCRASQSIETWLAWYQQKPGKAPKLLIYKASTLKTGVPSRFSGSGSGTEFTLTISGLQFDDFATYHCQHYDGRASTFGQGTRVEIKRTVAAPSVFIFPPSDEQLKSGTASVVCLLNNFYPREAKVQWKVDNALQSGNSQESVTEQDSKDSTYSLSSTLTLSKADYEKHKVYACEVTHQGLSSPVTKSFNRGEC

SEQ ID NO: 596 - protein, 215 aa, Artificial Sequence
  2G12 light chain variant
AGVVMTQSPSTLSASVGDTITITCRASQSIETWLAWYQQKPGKAPKLLIYKASTLKTGVPSRFSGSGSGTEFTLTISGLQFDDFATYHCQHYNGRTTTFGQGTRVEIKRTVAAPSVFIFPPSDEQLKSGTASVVCLLNNFYPREAKVQWKVDNALQSGNSQESVTEQDSKDSTYSLSSTLTLSKADYEKHKVYACEVTHQGLSSPVTKSFNRGEC

SEQ ID NO: 597 - protein, 215 aa, Artificial Sequence; identical to SEQ ID NO: 595
  2G12 light chain variant

SEQ ID NO: 598 - protein, 215 aa, Artificial Sequence
  2G12 light chain variant
AGVVMTQSPSTLSASVGDTITITCRASQSIETWLAWYQQKPGKAPKLLIYKASTLKTGVPSRFSGSGSGTEFTLTISGLQFDDFATYHCQHYSGYEATFGQGTRVEIKRTVAAPSVFIFPPSDEQLKSGTASVVCLLNNFYPREAKVQWKVDNALQSGNSQESVTEQDSKDSTYSLSSTLTLSKADYEKHKVYACEVTHQGLSSPVTKSFNRGEC

SEQ ID NO: 599 - protein, 215 aa, Artificial Sequence
  2G12 light chain variant
AGVVMTQSPSTLSASVGDTITITCRASQSIETWLAWYQQKPGKAPKLLIYKASTLKTGVPSRFSGSGSGTEFTLTISGLQFDDFATYHCQHYAGYDATFGQGTRVEIKRTVAAPSVFIFPPSDEQLKSGTASVVCLLNNFYPREAKVQWKVDNALQSGNSQESVTEQDSKDSTYSLSSTLTLSKADYEKHKVYACEVTHQGLSSPVTKSFNRGEC

SEQ ID NO: 600 - protein, 215 aa, Artificial Sequence
  2G12 light chain variant
AGVVMTQSPSTLSASVGDTITITCRASQSIETWLAWYQQKPGKAPKLLIYKASTLKTGVPSRFSGSGSGTEFTLTISGLQFDDFATYHCQHYAGYHATFGQGTRVEIKRTVAAPSVFIFPPSDEQLKSGTASVVCLLNNFYPREAKVQWKVDNALQSGNSQESVTEQDSKDSTYSLSSTLTLSKADYEKHKVYACEVTHQGLSSPVTKSFNRGEC

SEQ ID NO: 601 - protein, 215 aa, Artificial Sequence
  2G12 light chain variant
AGVVMTQSPSTLSASVGDTITITCRASQSIETWLAWYQQKPGKAPKLLIYKASTLKTGVPSRFSGSGSGTEFTLTISGLQFDDFATYHCQHYDGRIATFGQGTRVEIKRTVAAPSVFIFPPSDEQLKSGTASVVCLLNNFYPREAKVQWKVDNALQSGNSQESVTEQDSKDSTYSLSSTLTLSKADYEKHKVYACEVTHQGLSSPVTKSFNRGEC

SEQ ID NO: 602 - protein, 215 aa, Artificial Sequence
  2G12 light chain variant
AGVVMTQSPSTLSASVGDTITITCRASQSIETWLAWYQQKPGKAPKLLIYKASTLKTGVPSRFSGSGSGTEFTLTISGLQFDDFATYHCQHYEGRDATFGQGTRVEIKRTVAAPSVFIFPPSDEQLKSGTASVVCLLNNFYPREAKVQWKVDNALQSGNSQESVTEQDSKDSTYSLSSTLTLSKADYEKHKVYACEVTHQGLSSPVTKSFNRGEC

SEQ ID NO: 603 - protein, 215 aa, Artificial Sequence
  2G12 light chain variant
AGVVMTQSPSTLSASVGDTITITCRASQSIETWLAWYQQKPGKAPKLLIYKASTLKTGVPSRFSGSGSGTEFTLTISGLQFDDFATYHCQHYDGRHSTFGQGTRVEIKRTVAAPSVFIFPPSDEQLKSGTASVVCLLNNFYPREAKVQWKVDNALQSGNSQESVTEQDSKDSTYSLSSTLTLSKADYEKHKVYACEVTHQGLSSPVTKSFNRGEC

SEQ ID NO: 604 - protein, 215 aa, Artificial Sequence
  2G12 light chain variant
AGVVMTQSPSTLSASVGDTITITCRASQSIETWLAWYQQKPGKAPKLLIYKASTLKTGVPSRFSGSGSGTEFTLTISGLQFDDFATYHCQHHTGRSATFGQGTRVEIKRTVAAPSVFIFPPSDEQLKSGTASVVCLLNNFYPREAKVQWKVDNALQSGNSQESVTEQDSKDSTYSLSSTLTLSKADYEKHKVYACEVTHQGLSSPVTKSFNRGEC

SEQ ID NO: 605 - protein, 215 aa, Artificial Sequence
  2G12 light chain variant
AGVVMTQSPSTLSASVGDTITITCRASQSIETWLAWYQQKPGKAPKLLIYKASTLKTGVPSRFSGSGSGTEFTLTISGLQFDDFATYHCQHYTGNEATFGQGTRVEIKRTVAAPSVFIFPPSDEQLKSGTASVVCLLNNFYPREAKVQWKVDNALQSGNSQESVTEQDSKDSTYSLSSTLTLSKADYEKHKVYACEVTHQGLSSPVTKSFNRGEC

SEQ ID NO: 606 - protein, 215 aa, Artificial Sequence
  2G12 light chain variant
AGVVMTQSPSTLSASVGDTITITCRASQSIETWLAWYQQKPGKAPKLLIYKASTLKTGVPSRFSGSGSGTEFTLTISGLQFDDFATYHCQHYTGFAATFGQGTRVEIKRTVAAPSVFIFPPSDEQLKSGTASVVCLLNNFYPREAKVQWKVDNALQSGNSQESVTEQDSKDSTYSLSSTLTLSKADYEKHKVYACEVTHQGLSSPVTKSFNRGEC

SEQ ID NO: 607 - protein, 215 aa, Artificial Sequence
  2G12 light chain variant
AGVVMTQSPSTLSASVGDTITITCRASQSIETWLAWYQQKPGKAPKLLIYKASTLKTGVPSRFSGSGSGTEFTLTISGLQFDDFATYHCQHYDGRHATFGQGTRVEIKRTVAAPSVFIFPPSDEQLKSGTASVVCLLNNFYPREAKVQWKVDNALQSGNSQESVTEQDSKDSTYSLSSTLTLSKADYEKHKVYACEVTHQGLSSPVTKSFNRGEC

SEQ ID NO: 608 - protein, 215 aa, Artificial Sequence
  2G12 light chain variant
AGVVMTQSPSTLSASVGDTITITCRASQSIETWLAWYQQKPGKAPKLLIYKASTLKTGVPSRFSGSGSGTEFTLTISGLQFDDFATYHCQHYTGSHSTFGQGTRVEIKRTVAAPSVFIFPPSDEQLKSGTASVVCLLNNFYPREAKVQWKVDNALQSGNSQESVTEQDSKDSTYSLSSTLTLSKADYEKHKVYACEVTHQGLSSPVTKSFNRGEC

SEQ ID NO: 609 - protein, 215 aa, Artificial Sequence
  2G12 light chain variant
AGVVMTQSPSTLSASVGDTITITCRASQSIETWLAWYQQKPGKAPKLLIYKASTLKTGVPSRFSGSGSGTEFTLTISGLQFDDFATYHCQHYTGVASTFGQGTRVEIKRTVAAPSVFIFPPSDEQLKSGTASVVCLLNNFYPREAKVQWKVDNALQSGNSQESVTEQDSKDSTYSLSSTLTLSKADYEKHKVYACEVTHQGLSSPVTKSFNRGEC

SEQ ID NO: 610 - protein, 215 aa, Artificial Sequence
  2G12 light chain variant
AGVVMTQSPSTLSASVGDTITITCRASQSIETWLAWYQQKPGKAPKLLIYKASTLKTGVPSRFSGSGSGTEFTLTISGLQFDDFATYHCQHYEGQKSTFGQGTRVEIKRTVAAPSVFIFPPSDEQLKSGTASVVCLLNNFYPREAKVQWKVDNALQSGNSQESVTEQDSKDSTYSLSSTLTLSKADYEKHKVYACEVTHQGLSSPVTKSFNRGEC

SEQ ID NO: 611 - protein, 215 aa, Artificial Sequence
  2G12 light chain variant
AGVVMTQSPSTLSASVGDTITITCRASQSIETWLAWYQQKPGKAPKLLIYKASTLKTGVPSRFSGSGSGTEFTLTISGLQFDDFATYHCQHYNGYRSTFGQGTRVEIKRTVAAPSVFIFPPSDEQLKSGTASVVCLLNNFYPREAKVQWKVDNALQSGNSQESVTEQDSKDSTYSLSSTLTLSKADYEKHKVYACEVTHQGLSSPVTKSFNRGEC

SEQ ID NO: 612 - protein, 215 aa, Artificial Sequence
  2G12 light chain variant
AGVVMTQSPSTLSASVGDTITITCRASQSIETWLAWYQQKPGKAPKLLIYKASTLKTGVPSRFSGSGSGTEFTLTISGLQFDDFATYHCQHYTGRETTFGQGTRVEIKRTVAAPSVFIFPPSDEQLKSGTASVVCLLNNFYPREAKVQWKVDNALQSGNSQESVTEQDSKDSTYSLSSTLTLSKADYEKHKVYACEVTHQGLSSPVTKSFNRGEC

SEQ ID NO: 613 - protein, 215 aa, Artificial Sequence
  2G12 light chain variant
AGVVMTQSPSTLSASVGDTITITCRASQSIETWLAWYQQKPGKAPKLLIYKASTLKTGVPSRFSGSGSGTEFTLTISGLQFDDFATYHCQHYSGRLATFGQGTRVEIKRTVAAPSVFIFPPSDEQLKSGTASVVCLLNNFYPREAKVQWKVDNALQSGNSQESVTEQDSKDSTYSLSSTLTLSKADYEKHKVYACEVTHQGLSSPVTKSFNRGEC

SEQ ID NO: 614 - protein, 215 aa, Artificial Sequence
  2G12 light chain variant
AGVVMTQSPSTLSASVGDTITITCRASQSIETWLAWYQQKPGKAPKLLIYKASTLKTGVPSRFSGSGSGTEFTLTISGLQFDDFATYHCQHYSGLKSTFGQGTRVEIKRTVAAPSVFIFPPSDEQLKSGTASVVCLLNNFYPREAKVQWKVDNALQSGNSQESVTEQDSKDSTYSLSSTLTLSKADYEKHKVYACEVTHQGLSSPVTKSFNRGEC

SEQ ID NO: 615 - protein, 215 aa, Artificial Sequence
  2G12 light chain variant
AGVVMTQSPSTLSASVGDTITITCRASQSIETWLAWYQQKPGKAPKLLIYKASTLKTGVPSRFSGSGSGTEFTLTISGLQFDDFATYHCQHYHGRVATFGQGTRVEIKRTVAAPSVFIFPPSDEQLKSGTASVVCLLNNFYPREAKVQWKVDNALQSGNSQESVTEQDSKDSTYSLSSTLTLSKADYEKHKVYACEVTHQGLSSPVTKSFNRGEC

SEQ ID NO: 616 - protein, 215 aa, Artificial Sequence
  2G12 light chain variant
AGVVMTQSPSTLSASVGDTITITCRASQSIETWLAWYQQKPGKAPKLLIYKASTLKTGVPSRFSGSGSGTEFTLTISGLQFDDFATYHCQHYNGATSTFGQGTRVEIKRTVAAPSVFIFPPSDEQLKSGTASVVCLLNNFYPREAKVQWKVDNALQSGNSQESVTEQDSKDSTYSLSSTLTLSKADYEKHKVYACEVTHQGLSSPVTKSFNRGEC

SEQ ID NO: 617 - protein, 215 aa, Artificial Sequence
  2G12 light chain variant
AGVVMTQSPSTLSASVGDTITITCRASQSIETWLAWYQQKPGKAPKLLIYKASTLKTGVPSRFSGSGSGTEFTLTISGLQFDDFATYHCQHYTGTRSTFGQGTRVEIKRTVAAPSVFIFPPSDEQLKSGTASVVCLLNNFYPREAKVQWKVDNALQSGNSQESVTEQDSKDSTYSLSSTLTLSKADYEKHKVYACEVTHQGLSSPVTKSFNRGEC

SEQ ID NO: 618 - protein, 215 aa, Artificial Sequence
  2G12 light chain variant
AGVVMTQSPSTLSASVGDTITITCRASQSIETWLAWYQQKPGKAPKLLIYKASTLKTGVPSRFSGSGSGTEFTLTISGLQFDDFATYHCQHYSGTSSTFGQGTRVEIKRTVAAPSVFIFPPSDEQLKSGTASVVCLLNNFYPREAKVQWKVDNALQSGNSQESVTEQDSKDSTYSLSSTLTLSKADYEKHKVYACEVTHQGLSSPVTKSFNRGEC

SEQ ID NO: 619 - protein, 215 aa, Artificial Sequence
  2G12 light chain variant
AGVVMTQSPSTLSASVGDTITITCRASQSIETWLAWYQQKPGKAPKLLIYKASTLKTGVPSRFSGSGSGTEFTLTISGLQFDDFATYHCQHYTGSASTFGQGTRVEIKRTVAAPSVFIFPPSDEQLKSGTASVVCLLNNFYPREAKVQWKVDNALQSGNSQESVTEQDSKDSTYSLSSTLTLSKADYEKHKVYACEVTHQGLSSPVTKSFNRGEC

SEQ ID NO: 620 - protein, 215 aa, Artificial Sequence
  2G12 light chain variant
AGVVMTQSPSTLSASVGDTITITCRASQSIETWLAWYQQKPGKAPKLLIYKASTLKTGVPSRFSGSGSGTEFTLTISGLQFDDFATYHCQHYDGMTSTFGQGTRVEIKRTVAAPSVFIFPPSDEQLKSGTASVVCLLNNFYPREAKVQWKVDNALQSGNSQESVTEQDSKDSTYSLSSTLTLSKADYEKHKVYACEVTHQGLSSPVTKSFNRGEC

SEQ ID NO: 621 - protein, 215 aa, Artificial Sequence
  2G12 light chain variant
AGVVMTQSPSTLSASVGDTITITCRASQSIETWLAWYQQKPGKAPKLLIYKASTLKTGVPSRFSGSGSGTEFTLTISGLQFDDFATYHCQHYTGMRTTFGQGTRVEIKRTVAAPSVFIFPPSDEQLKSGTASVVCLLNNFYPREAKVQWKVDNALQSGNSQESVTEQDSKDSTYSLSSTLTLSKADYEKHKVYACEVTHQGLSSPVTKSFNRGEC

SEQ ID NO: 622 - protein, 215 aa, Artificial Sequence
  2G12 light chain variant
AGVVMTQSPSTLSASVGDTITITCRASQSIETWLAWYQQKPGKAPKLLIYKASTLKTGVPSRFSGSGSGTEFTLTISGLQFDDFATYHCQHYEGRTSTFGQGTRVEIKRTVAAPSVFIFPPSDEQLKSGTASVVCLLNNFYPREAKVQWKVDNALQSGNSQESVTEQDSKDSTYSLSSTLTLSKADYEKHKVYACEVTHQGLSSPVTKSFNRGEC

SEQ ID NO: 623 - protein, 215 aa, Artificial Sequence
  2G12 light chain variant
AGVVMTQSPSTLSASVGDTITITCRASQSIETWLAWYQQKPGKAPKLLIYKASTLKTGVPSRFSGSGSGTEFTLTISGLQFDDFATYHCQHYTGRESTFGQGTRVEIKRTVAAPSVFIFPPSDEQLKSGTASVVCLLNNFYPREAKVQWKVDNALQSGNSQESVTEQDSKDSTYSLSSTLTLSKADYEKHKVYACEVTHQGLSSPVTKSFNRGEC

SEQ ID NO: 624 - protein, 215 aa, Artificial Sequence
  2G12 light chain variant
AGVVMTQSPSTLSASVGDTITITCRASQSIETWLAWYQQKPGKAPKLLIYKASTLKTGVPSRFSGSGSGTEFTLTISGLQFDDFATYHCQHYLGRSSTFGQGTRVEIKRTVAAPSVFIFPPSDEQLKSGTASVVCLLNNFYPREAKVQWKVDNALQSGNSQESVTEQDSKDSTYSLSSTLTLSKADYEKHKVYACEVTHQGLSSPVTKSFNRGEC

SEQ ID NO: 625 - protein, 215 aa, Artificial Sequence
  2G12 light chain variant
AGVVMTQSPSTLSASVGDTITITCRASQSIETWLAWYQQKPGKAPKLLIYKASTLKTGVPSRFSGSGSGTEFTLTISGLQFDDFATYHCQHYTGESCTFGQGTRVEIKRTVAAPSVFIFPPSDEQLKSGTASVVCLLNNFYPREAKVQWKVDNALQSGNSQESVTEQDSKDSTYSLSSTLTLSKADYEKHKVYACEVTHQGLSSPVTKSFNRGEC

SEQ ID NO: 626 - protein, 215 aa, Artificial Sequence
  2G12 light chain variant
AGVVMTQSPSTLSASVGDTITITCRASQSIETWLAWYQQKPGKAPKLLIYKASTLKTGVPSRFSGSGSGTEFTLTISGLQFDDFATYHCQHYSGRSSTFGQGTRVEIKRTVAAPSVFIFPPSDEQLKSGTASVVCLLNNFYPREAKVQWKVDNALQSGNSQESVTEQDSKDSTYSLSSTLTLSKADYEKHKVYACEVTHQGLSSPVTKSFNRGEC

SEQ ID NO: 627 - protein, 215 aa, Artificial Sequence
  2G12 light chain variant
AGVVMTQSPSTLSASVGDTITITCRASQSIETWLAWYQQKPGKAPKLLIYKASTLKTGVPSRFSGSGSGTEFTLTISGLQFDDFATYHCQHYTGRASTFGQGTRVEIKRTVAAPSVFIFPPSDEQLKSGTASVVCLLNNFYPREAKVQWKVDNALQSGNSQESVTEQDSKDSTYSLSSTLTLSKADYEKHKVYACEVTHQGLSSPVTKSFNRGEC

SEQ ID NO: 628 - protein, 215 aa, Artificial Sequence
  2G12 light chain variant
AGVVMTQSPSTLSASVGDTITITCRASQSIETWLAWYQQKPGKAPKLLIYKASTLKTGVPSRFSGSGSGTEFTLTISGLQFDDFATYHCQHYEGRGATFGQGTRVEIKRTVAAPSVFIFPPSDEQLKSGTASVVCLLNNFYPREAKVQWKVDNALQSGNSQESVTEQDSKDSTYSLSSTLTLSKADYEKHKVYACEVTHQGLSSPVTKSFNRGEC

SEQ ID NO: 629 - protein, 215 aa, Artificial Sequence
  2G12 light chain variant
AGVVMTQSPSTLSASVGDTITITCRASQSIETWLAWYQQKPGKAPKLLIYKASTLKTGVPSRFSGSGSGTEFTLTISGLQFDDFATYHCQHYSGRSATFGQGTRVEIKRTVAAPSVFIFPPSDEQLKSGTASVVCLLNNFYPREAKVQWKVDNALQSGNSQESVTEQDSKDSTYSLSSTLTLSKADYEKHKVYACEVTHQGLSSPVTKSFNRGEC

SEQ ID NO: 630 - protein, 215 aa, Artificial Sequence
  2G12 light chain variant
AGVVMTQSPSTLSASVGDTITITCRASQSIETWLAWYQQKPGKAPKLLIYKASTLKTGVPSRFSGSGSGTEFTLTISGLQFDDFATYHCQHYTGMFATFGQGTRVEIKRTVAAPSVFIFPPSDEQLKSGTASVVCLLNNFYPREAKVQWKVDNALQSGNSQESVTEQDSKDSTYSLSSTLTLSKADYEKHKVYACEVTHQGLSSPVTKSFNRGEC

SEQ ID NO: 631 - protein, 215 aa, Artificial Sequence
  2G12 light chain variant
AGVVMTQSPSTLSASVGDTITITCRASQSIETWLAWYQQKPGKAPKLLIYKASTLKTGVPSRFSGSGSGTEFTLTISGLQFDDFATYHCQHYSGVNSTFGQGTRVEIKRTVAAPSVFIFPPSDEQLKSGTASVVCLLNNFYPREAKVQWKVDNALQSGNSQESVTEQDSKDSTYSLSSTLTLSKADYEKHKVYACEVTHQGLSSPVTKSFNRGEC

SEQ ID NO: 632 - protein, 215 aa, Artificial Sequence
  2G12 light chain variant
AGVVMTQSPSTLSASVGDTITITCRASQSIETWLAWYQQKPGKAPKLLIYKASTLKTGVPSRFSGSGSGTEFTLTISGLQFDDFATYHCQHYLGQRTTFGQGTRVEIKRTVAAPSVFIFPPSDEQLKSGTASVVCLLNNFYPREAKVQWKVDNALQSGNSQESVTEQDSKDSTYSLSSTLTLSKADYEKHKVYACEVTHQGLSSPVTKSFNRGEC

SEQ ID NO: 633 - protein, 215 aa, Artificial Sequence
  2G12 light chain variant
AGVVMTQSPSTLSASVGDTITITCRASQSIETWLAWYQQKPGKAPKLLIYKASTLKTGVPSRFSGSGSGTEFTLTISGLQFDDFATYHCQHYTGMLNTFGQGTRVEIKRTVAAPSVFIFPPSDEQLKSGTASVVCLLNNFYPREAKVQWKVDNALQSGNSQESVTEQDSKDSTYSLSSTLTLSKADYEKHKVYACEVTHQGLSSPVTKSFNRGEC

SEQ ID NO: 634 - protein, 215 aa, Artificial Sequence
  2G12 light chain variant
AGVVMTQSPSTLSASVGDTITITCRASQSIETWLAWYQQKPGKAPKLLIYKASTLKTGVPSRFSGSGSGTEFTLTISGLQFDDFATYHCQHYDGNESTFGQGTRVEIKRTVAAPSVFIFPPSDEQLKSGTASVVCLLNNFYPREAKVQWKVDNALQSGNSQESVTEQDSKDSTYSLSSTLTLSKADYEKHKVYACEVTHQGLSSPVTKSFNRGEC

SEQ ID NO: 635 - protein, 215 aa, Artificial Sequence
  2G12 light chain variant
AGVVMTQSPSTLSASVGDTITITCRASQSIETWLAWYQQKPGKAPKLLIYKASTLKTGVPSRFSGSGSGTEFTLTISGLQFDDFATYHCQHREGVYSTFGQGTRVEIKRTVAAPSVFIFPPSDEQLKSGTASVVCLLNNFYPREAKVQWKVDNALQSGNSQESVTEQDSKDSTYSLSSTLTLSKADYEKHKVYACEVTHQGLSSPVTKSFNRGEC

SEQ ID NO: 636 - protein, 214 aa, Artificial Sequence
  2G12 light chain variant
DVVMTQSPSTLSASVGDTITITCRASQSIETWLAWYQQKPGKAPKLLIYKASTLKTGVPSRFSGSGSGTEFTLTISGLQFDDFATYHCQHYDGRASTFGQGTRVEIKRTVAAPSVFIFPPSDEQLKSGTASVVCLLNNFYPREAKVQWKVDNALQSGNSQESVTEQDSKDSTYSLSSTLTLSKADYEKHKVYACEVTHQGLSSPVTKSFNRGEC

SEQ ID NO: 637 - protein, 214 aa, Artificial Sequence
  2G12 light chain variant
DVVMTQSPSTLSASVGDTITITCRASQSIETWLAWYQQKPGKAPKLLIYKASTLKTGVPSRFSGSGSGTEFTLTISGLQFDDFATYHCQHYNGRTTTFGQGTRVEIKRTVAAPSVFIFPPSDEQLKSGTASVVCLLNNFYPREAKVQWKVDNALQSGNSQESVTEQDSKDSTYSLSSTLTLSKADYEKHKVYACEVTHQGLSSPVTKSFNRGEC

SEQ ID NO: 638 - protein, 214 aa, Artificial Sequence; identical to SEQ ID NO: 636
  2G12 light chain variant

SEQ ID NO: 639 - protein, 214 aa, Artificial Sequence
  2G12 light chain variant
DVVMTQSPSTLSASVGDTITITCRASQSIETWLAWYQQKPGKAPKLLIYKASTLKTGVPSRFSGSGSGTEFTLTISGLQFDDFATYHCQHYSGYEATFGQGTRVEIKRTVAAPSVFIFPPSDEQLKSGTASVVCLLNNFYPREAKVQWKVDNALQSGNSQESVTEQDSKDSTYSLSSTLTLSKADYEKHKVYACEVTHQGLSSPVTKSFNRGEC

SEQ ID NO: 640 - protein, 214 aa, Artificial Sequence
  2G12 light chain variant
DVVMTQSPSTLSASVGDTITITCRASQSIETWLAWYQQKPGKAPKLLIYKASTLKTGVPSRFSGSGSGTEFTLTISGLQFDDFATYHCQHYAGYDATFGQGTRVEIKRTVAAPSVFIFPPSDEQLKSGTASVVCLLNNFYPREAKVQWKVDNALQSGNSQESVTEQDSKDSTYSLSSTLTLSKADYEKHKVYACEVTHQGLSSPVTKSFNRGEC

SEQ ID NO: 641 - protein, 214 aa, Artificial Sequence
  2G12 light chain variant
DVVMTQSPSTLSASVGDTITITCRASQSIETWLAWYQQKPGKAPKLLIYKASTLKTGVPSRFSGSGSGTEFTLTISGLQFDDFATYHCQHYAGYHATFGQGTRVEIKRTVAAPSVFIFPPSDEQLKSGTASVVCLLNNFYPREAKVQWKVDNALQSGNSQESVTEQDSKDSTYSLSSTLTLSKADYEKHKVYACEVTHQGLSSPVTKSFNRGEC

SEQ ID NO: 642 - protein, 214 aa, Artificial Sequence
  2G12 light chain variant
DVVMTQSPSTLSASVGDTITITCRASQSIETWLAWYQQKPGKAPKLLIYKASTLKTGVPSRFSGSGSGTEFTLTISGLQFDDFATYHCQHYDGRIATFGQGTRVEIKRTVAAPSVFIFPPSDEQLKSGTASVVCLLNNFYPREAKVQWKVDNALQSGNSQESVTEQDSKDSTYSLSSTLTLSKADYEKHKVYACEVTHQGLSSPVTKSFNRGEC

SEQ ID NO: 643 - protein, 214 aa, Artificial Sequence
  2G12 light chain variant
DVVMTQSPSTLSASVGDTITITCRASQSIETWLAWYQQKPGKAPKLLIYKASTLKTGVPSRFSGSGSGTEFTLTISGLQFDDFATYHCQHYEGRDATFGQGTRVEIKRTVAAPSVFIFPPSDEQLKSGTASVVCLLNNFYPREAKVQWKVDNALQSGNSQESVTEQDSKDSTYSLSSTLTLSKADYEKHKVYACEVTHQGLSSPVTKSFNRGEC

SEQ ID NO: 644 - protein, 214 aa, Artificial Sequence
  2G12 light chain variant
DVVMTQSPSTLSASVGDTITITCRASQSIETWLAWYQQKPGKAPKLLIYKASTLKTGVPSRFSGSGSGTEFTLTISGLQFDDFATYHCQHYDGRHSTFGQGTRVEIKRTVAAPSVFIFPPSDEQLKSGTASVVCLLNNFYPREAKVQWKVDNALQSGNSQESVTEQDSKDSTYSLSSTLTLSKADYEKHKVYACEVTHQGLSSPVTKSFNRGEC

SEQ ID NO: 645 - protein, 214 aa, Artificial Sequence
  2G12 light chain variant
DVVMTQSPSTLSASVGDTITITCRASQSIETWLAWYQQKPGKAPKLLIYKASTLKTGVPSRFSGSGSGTEFTLTISGLQFDDFATYHCQHHTGRSATFGQGTRVEIKRTVAAPSVFIFPPSDEQLKSGTASVVCLLNNFYPREAKVQWKVDNALQSGNSQESVTEQDSKDSTYSLSSTLTLSKADYEKHKVYACEVTHQGLSSPVTKSFNRGEC

SEQ ID NO: 646 - protein, 214 aa, Artificial Sequence
  2G12 light chain variant
DVVMTQSPSTLSASVGDTITITCRASQSIETWLAWYQQKPGKAPKLLIYKASTLKTGVPSRFSGSGSGTEFTLTISGLQFDDFATYHCQHYTGNEATFGQGTRVEIKRTVAAPSVFIFPPSDEQLKSGTASVVCLLNNFYPREAKVQWKVDNALQSGNSQESVTEQDSKDSTYSLSSTLTLSKADYEKHKVYACEVTHQGLSSPVTKSFNRGEC

SEQ ID NO: 647 - protein, 214 aa, Artificial Sequence
  2G12 light chain variant
DVVMTQSPSTLSASVGDTITITCRASQSIETWLAWYQQKPGKAPKLLIYKASTLKTGVPSRFSGSGSGTEFTLTISGLQFDDFATYHCQHYTGFAATFGQGTRVEIKRTVAAPSVFIFPPSDEQLKSGTASVVCLLNNFYPREAKVQWKVDNALQSGNSQESVTEQDSKDSTYSLSSTLTLSKADYEKHKVYACEVTHQGLSSPVTKSFNRGEC

SEQ ID NO: 648 - protein, 214 aa, Artificial Sequence
  2G12 light chain variant
DVVMTQSPSTLSASVGDTITITCRASQSIETWLAWYQQKPGKAPKLLIYKASTLKTGVPSRFSGSGSGTEFTLTISGLQFDDFATYHCQHYDGRHATFGQGTRVEIKRTVAAPSVFIFPPSDEQLKSGTASVVCLLNNFYPREAKVQWKVDNALQSGNSQESVTEQDSKDSTYSLSSTLTLSKADYEKHKVYACEVTHQGLSSPVTKSFNRGEC

SEQ ID NO: 649 - protein, 214 aa, Artificial Sequence
  2G12 light chain variant
DVVMTQSPSTLSASVGDTITITCRASQSIETWLAWYQQKPGKAPKLLIYKASTLKTGVPSRFSGSGSGTEFTLTISGLQFDDFATYHCQHYTGSHSTFGQGTRVEIKRTVAAPSVFIFPPSDEQLKSGTASVVCLLNNFYPREAKVQWKVDNALQSGNSQESVTEQDSKDSTYSLSSTLTLSKADYEKHKVYACEVTHQGLSSPVTKSFNRGEC

SEQ ID NO: 650 - protein, 214 aa, Artificial Sequence
  2G12 light chain variant
DVVMTQSPSTLSASVGDTITITCRASQSIETWLAWYQQKPGKAPKLLIYKASTLKTGVPSRFSGSGSGTEFTLTISGLQFDDFATYHCQHYTGVASTFGQGTRVEIKRTVAAPSVFIFPPSDEQLKSGTASVVCLLNNFYPREAKVQWKVDNALQSGNSQESVTEQDSKDSTYSLSSTLTLSKADYEKHKVYACEVTHQGLSSPVTKSFNRGEC

SEQ ID NO: 651 - protein, 214 aa, Artificial Sequence
  2G12 light chain variant
DVVMTQSPSTLSASVGDTITITCRASQSIETWLAWYQQKPGKAPKLLIYKASTLKTGVPSRFSGSGSGTEFTLTISGLQFDDFATYHCQHYEGQKSTFGQGTRVEIKRTVAAPSVFIFPPSDEQLKSGTASVVCLLNNFYPREAKVQWKVDNALQSGNSQESVTEQDSKDSTYSLSSTLTLSKADYEKHKVYACEVTHQGLSSPVTKSFNRGEC

SEQ ID NO: 652 - protein, 214 aa, Artificial Sequence
  2G12 light chain variant
DVVMTQSPSTLSASVGDTITITCRASQSIETWLAWYQQKPGKAPKLLIYKASTLKTGVPSRFSGSGSGTEFTLTISGLQFDDFATYHCQHYNGYRSTFGQGTRVEIKRTVAAPSVFIFPPSDEQLKSGTASVVCLLNNFYPREAKVQWKVDNALQSGNSQESVTEQDSKDSTYSLSSTLTLSKADYEKHKVYACEVTHQGLSSPVTKSFNRGEC

SEQ ID NO: 653 - protein, 214 aa, Artificial Sequence
  2G12 light chain variant
DVVMTQSPSTLSASVGDTITITCRASQSIETWLAWYQQKPGKAPKLLIYKASTLKTGVPSRFSGSGSGTEFTLTISGLQFDDFATYHCQHYTGRETTFGQGTRVEIKRTVAAPSVFIFPPSDEQLKSGTASVVCLLNNFYPREAKVQWKVDNALQSGNSQESVTEQDSKDSTYSLSSTLTLSKADYEKHKVYACEVTHQGLSSPVTKSFNRGEC

SEQ ID NO: 654 - protein, 214 aa, Artificial Sequence
  2G12 light chain variant
DVVMTQSPSTLSASVGDTITITCRASQSIETWLAWYQQKPGKAPKLLIYKASTLKTGVPSRFSGSGSGTEFTLTISGLQFDDFATYHCQHYSGRLATFGQGTRVEIKRTVAAPSVFIFPPSDEQLKSGTASVVCLLNNFYPREAKVQWKVDNALQSGNSQESVTEQDSKDSTYSLSSTLTLSKADYEKHKVYACEVTHQGLSSPVTKSFNRGEC

SEQ ID NO: 655 - protein, 214 aa, Artificial Sequence
  2G12 light chain variant
DVVMTQSPSTLSASVGDTITITCRASQSIETWLAWYQQKPGKAPKLLIYKASTLKTGVPSRFSGSGSGTEFTLTISGLQFDDFATYHCQHYSGLKSTFGQGTRVEIKRTVAAPSVFIFPPSDEQLKSGTASVVCLLNNFYPREAKVQWKVDNALQSGNSQESVTEQDSKDSTYSLSSTLTLSKADYEKHKVYACEVTHQGLSSPVTKSFNRGEC

SEQ ID NO: 656 - protein, 214 aa, Artificial Sequence
  2G12 light chain variant
DVVMTQSPSTLSASVGDTITITCRASQSIETWLAWYQQKPGKAPKLLIYKASTLKTGVPSRFSGSGSGTEFTLTISGLQFDDFATYHCQHYHGRVATFGQGTRVEIKRTVAAPSVFIFPPSDEQLKSGTASVVCLLNNFYPREAKVQWKVDNALQSGNSQESVTEQDSKDSTYSLSSTLTLSKADYEKHKVYACEVTHQGLSSPVTKSFNRGEC

SEQ ID NO: 657 - protein, 214 aa, Artificial Sequence
  2G12 light chain variant
DVVMTQSPSTLSASVGDTITITCRASQSIETWLAWYQQKPGKAPKLLIYKASTLKTGVPSRFSGSGSGTEFTLTISGLQFDDFATYHCQHYNGATSTFGQGTRVEIKRTVAAPSVFIFPPSDEQLKSGTASVVCLLNNFYPREAKVQWKVDNALQSGNSQESVTEQDSKDSTYSLSSTLTLSKADYEKHKVYACEVTHQGLSSPVTKSFNRGEC

SEQ ID NO: 658 - protein, 214 aa, Artificial Sequence
  2G12 light chain variant
DVVMTQSPSTLSASVGDTITITCRASQSIETWLAWYQQKPGKAPKLLIYKASTLKTGVPSRFSGSGSGTEFTLTISGLQFDDFATYHCQHYTGTRSTFGQGTRVEIKRTVAAPSVFIFPPSDEQLKSGTASVVCLLNNFYPREAKVQWKVDNALQSGNSQESVTEQDSKDSTYSLSSTLTLSKADYEKHKVYACEVTHQGLSSPVTKSFNRGEC

SEQ ID NO: 659 - protein, 214 aa, Artificial Sequence
  2G12 light chain variant
DVVMTQSPSTLSASVGDTITITCRASQSIETWLAWYQQKPGKAPKLLIYKASTLKTGVPSRFSGSGSGTEFTLTISGLQFDDFATYHCQHYSGTSSTFGQGTRVEIKRTVAAPSVFIFPPSDEQLKSGTASVVCLLNNFYPREAKVQWKVDNALQSGNSQESVTEQDSKDSTYSLSSTLTLSKADYEKHKVYACEVTHQGLSSPVTKSFNRGEC

SEQ ID NO: 660 - protein, 214 aa, Artificial Sequence
  2G12 light chain variant
DVVMTQSPSTLSASVGDTITITCRASQSIETWLAWYQQKPGKAPKLLIYKASTLKTGVPSRFSGSGSGTEFTLTISGLQFDDFATYHCQHYTGSASTFGQGTRVEIKRTVAAPSVFIFPPSDEQLKSGTASVVCLLNNFYPREAKVQWKVDNALQSGNSQESVTEQDSKDSTYSLSSTLTLSKADYEKHKVYACEVTHQGLSSPVTKSFNRGEC

SEQ ID NO: 661 - protein, 214 aa, Artificial Sequence
  2G12 light chain variant
DVVMTQSPSTLSASVGDTITITCRASQSIETWLAWYQQKPGKAPKLLIYKASTLKTGVPSRFSGSGSGTEFTLTISGLQFDDFATYHCQHYDGMTSTFGQGTRVEIKRTVAAPSVFIFPPSDEQLKSGTASVVCLLNNFYPREAKVQWKVDNALQSGNSQESVTEQDSKDSTYSLSSTLTLSKADYEKHKVYACEVTHQGLSSPVTKSFNRGEC

SEQ ID NO: 662 - protein, 214 aa, Artificial Sequence
  2G12 light chain variant
DVVMTQSPSTLSASVGDTITITCRASQSIETWLAWYQQKPGKAPKLLIYKASTLKTGVPSRFSGSGSGTEFTLTISGLQFDDFATYHCQHYTGMRTTFGQGTRVEIKRTVAAPSVFIFPPSDEQLKSGTASVVCLLNNFYPREAKVQWKVDNALQSGNSQESVTEQDSKDSTYSLSSTLTLSKADYEKHKVYACEVTHQGLSSPVTKSFNRGEC

SEQ ID NO: 663 - protein, 214 aa, Artificial Sequence
  2G12 light chain variant
DVVMTQSPSTLSASVGDTITITCRASQSIETWLAWYQQKPGKAPKLLIYKASTLKTGVPSRFSGSGSGTEFTLTISGLQFDDFATYHCQHYEGRTSTFGQGTRVEIKRTVAAPSVFIFPPSDEQLKSGTASVVCLLNNFYPREAKVQWKVDNALQSGNSQESVTEQDSKDSTYSLSSTLTLSKADYEKHKVYACEVTHQGLSSPVTKSFNRGEC

SEQ ID NO: 664 - protein, 214 aa, Artificial Sequence
  2G12 light chain variant
DVVMTQSPSTLSASVGDTITITCRASQSIETWLAWYQQKPGKAPKLLIYKASTLKTGVPSRFSGSGSGTEFTLTISGLQFDDFATYHCQHYTGRESTFGQGTRVEIKRTVAAPSVFIFPPSDEQLKSGTASVVCLLNNFYPREAKVQWKVDNALQSGNSQESVTEQDSKDSTYSLSSTLTLSKADYEKHKVYACEVTHQGLSSPVTKSFNRGEC

SEQ ID NO: 665 - protein, 214 aa, Artificial Sequence
  2G12 light chain variant
DVVMTQSPSTLSASVGDTITITCRASQSIETWLAWYQQKPGKAPKLLIYKASTLKTGVPSRFSGSGSGTEFTLTISGLQFDDFATYHCQHYLGRSSTFGQGTRVEIKRTVAAPSVFIFPPSDEQLKSGTASVVCLLNNFYPREAKVQWKVDNALQSGNSQESVTEQDSKDSTYSLSSTLTLSKADYEKHKVYACEVTHQGLSSPVTKSFNRGEC

SEQ ID NO: 666 - protein, 214 aa, Artificial Sequence
  2G12 light chain variant
DVVMTQSPSTLSASVGDTITITCRASQSIETWLAWYQQKPGKAPKLLIYKASTLKTGVPSRFSGSGSGTEFTLTISGLQFDDFATYHCQHYTGESCTFGQGTRVEIKRTVAAPSVFIFPPSDEQLKSGTASVVCLLNNFYPREAKVQWKVDNALQSGNSQESVTEQDSKDSTYSLSSTLTLSKADYEKHKVYACEVTHQGLSSPVTKSFNRGEC

SEQ ID NO: 667 - protein, 214 aa, Artificial Sequence
  2G12 light chain variant
DVVMTQSPSTLSASVGDTITITCRASQSIETWLAWYQQKPGKAPKLLIYKASTLKTGVPSRFSGSGSGTEFTLTISGLQFDDFATYHCQHYSGRSSTFGQGTRVEIKRTVAAPSVFIFPPSDEQLKSGTASVVCLLNNFYPREAKVQWKVDNALQSGNSQESVTEQDSKDSTYSLSSTLTLSKADYEKHKVYACEVTHQGLSSPVTKSFNRGEC

SEQ ID NO: 668 - protein, 214 aa, Artificial Sequence
  2G12 light chain variant
DVVMTQSPSTLSASVGDTITITCRASQSIETWLAWYQQKPGKAPKLLIYKASTLKTGVPSRFSGSGSGTEFTLTISGLQFDDFATYHCQHYTGRASTFGQGTRVEIKRTVAAPSVFIFPPSDEQLKSGTASVVCLLNNFYPREAKVQWKVDNALQSGNSQESVTEQDSKDSTYSLSSTLTLSKADYEKHKVYACEVTHQGLSSPVTKSFNRGEC

SEQ ID NO: 669 - protein, 214 aa, Artificial Sequence
  2G12 light chain variant
DVVMTQSPSTLSASVGDTITITCRASQSIETWLAWYQQKPGKAPKLLIYKASTLKTGVPSRFSGSGSGTEFTLTISGLQFDDFATYHCQHYEGRGATFGQGTRVEIKRTVAAPSVFIFPPSDEQLKSGTASVVCLLNNFYPREAKVQWKVDNALQSGNSQESVTEQDSKDSTYSLSSTLTLSKADYEKHKVYACEVTHQGLSSPVTKSFNRGEC

SEQ ID NO: 670 - protein, 214 aa, Artificial Sequence
  2G12 light chain variant
DVVMTQSPSTLSASVGDTITITCRASQSIETWLAWYQQKPGKAPKLLIYKASTLKTGVPSRFSGSGSGTEFTLTISGLQFDDFATYHCQHYSGRSATFGQGTRVEIKRTVAAPSVFIFPPSDEQLKSGTASVVCLLNNFYPREAKVQWKVDNALQSGNSQESVTEQDSKDSTYSLSSTLTLSKADYEKHKVYACEVTHQGLSSPVTKSFNRGEC

SEQ ID NO: 671 - protein, 214 aa, Artificial Sequence
  2G12 light chain variant
DVVMTQSPSTLSASVGDTITITCRASQSIETWLAWYQQKPGKAPKLLIYKASTLKTGVPSRFSGSGSGTEFTLTISGLQFDDFATYHCQHYTGMFATFGQGTRVEIKRTVAAPSVFIFPPSDEQLKSGTASVVCLLNNFYPREAKVQWKVDNALQSGNSQESVTEQDSKDSTYSLSSTLTLSKADYEKHKVYACEVTHQGLSSPVTKSFNRGEC

SEQ ID NO: 672 - protein, 214 aa, Artificial Sequence
  2G12 light chain variant
DVVMTQSPSTLSASVGDTITITCRASQSIETWLAWYQQKPGKAPKLLIYKASTLKTGVPSRFSGSGSGTEFTLTISGLQFDDFATYHCQHYSGVNSTFGQGTRVEIKRTVAAPSVFIFPPSDEQLKSGTASVVCLLNNFYPREAKVQWKVDNALQSGNSQESVTEQDSKDSTYSLSSTLTLSKADYEKHKVYACEVTHQGLSSPVTKSFNRGEC

SEQ ID NO: 673 - protein, 214 aa, Artificial Sequence
  2G12 light chain variant
DVVMTQSPSTLSASVGDTITITCRASQSIETWLAWYQQKPGKAPKLLIYKASTLKTGVPSRFSGSGSGTEFTLTISGLQFDDFATYHCQHYLGQRTTFGQGTRVEIKRTVAAPSVFIFPPSDEQLKSGTASVVCLLNNFYPREAKVQWKVDNALQSGNSQESVTEQDSKDSTYSLSSTLTLSKADYEKHKVYACEVTHQGLSSPVTKSFNRGEC

SEQ ID NO: 674 - protein, 214 aa, Artificial Sequence
  2G12 light chain variant
DVVMTQSPSTLSASVGDTITITCRASQSIETWLAWYQQKPGKAPKLLIYKASTLKTGVPSRFSGSGSGTEFTLTISGLQFDDFATYHCQHYTGMLNTFGQGTRVEIKRTVAAPSVFIFPPSDEQLKSGTASVVCLLNNFYPREAKVQWKVDNALQSGNSQESVTEQDSKDSTYSLSSTLTLSKADYEKHKVYACEVTHQGLSSPVTKSFNRGEC

SEQ ID NO: 675 - protein, 214 aa, Artificial Sequence
  2G12 light chain variant
DVVMTQSPSTLSASVGDTITITCRASQSIETWLAWYQQKPGKAPKLLIYKASTLKTGVPSRFSGSGSGTEFTLTISGLQFDDFATYHCQHYDGNESTFGQGTRVEIKRTVAAPSVFIFPPSDEQLKSGTASVVCLLNNFYPREAKVQWKVDNALQSGNSQESVTEQDSKDSTYSLSSTLTLSKADYEKHKVYACEVTHQGLSSPVTKSFNRGEC

SEQ ID NO: 676 - protein, 214 aa, Artificial Sequence
  2G12 light chain variant
DVVMTQSPSTLSASVGDTITITCRASQSIETWLAWYQQKPGKAPKLLIYKASTLKTGVPSRFSGSGSGTEFTLTISGLQFDDFATYHCQHREGVYSTFGQGTRVEIKRTVAAPSVFIFPPSDEQLKSGTASVVCLLNNFYPREAKVQWKVDNALQSGNSQESVTEQDSKDSTYSLSSTLTLSKADYEKHKVYACEVTHQGLSSPVTKSFNRGEC

SEQ ID NO: 677 - protein, 107 aa, Artificial Sequence
  DIQ 2G12 Variable Light Chain
DIQMTQSPSTLSASVGDTITITCRASQSIETWLAWYQQKPGKAPKLLIYKASTLKTGVPSRFSGSGSGTEFTLTISGLQFDDFATYHCQHYAGYSATFGQGTRVEIK

SEQ ID NO: 678 - protein, 9 aa, Artificial Sequence
  anti-C. albicans 2G12 variant CDRL3
QHYKPFMAT

SEQ ID NO: 679 - protein, 9 aa, Artificial Sequence
  anti-C. albicans 2G12 variant CDRL3
QHYQPFDAT

SEQ ID NO: 680 - protein, 9 aa, Artificial Sequence
  anti-C. albicans 2G12 variant CDRL3
QHYREWHAT

SEQ ID NO: 681 - protein, 9 aa, Artificial Sequence
  anti-C. albicans 2G12 variant CDRL3
QHYLSYNAT

SEQ ID NO: 682 - protein, 9 aa, Artificial Sequence
  anti-C. albicans 2G12 variant CDRL3
QHYQPFKAT

SEQ ID NO: 683 - protein, 9 aa, Artificial Sequence
  anti-C. albicans 2G12 variant CDRL3
QHYMAYDAT

SEQ ID NO: 684 - protein, 10 aa, Artificial Sequence
  anti-C. albicans 2G12 variant CDRL3
QHYTAHNGAT

SEQ ID NO: 685 - protein, 10 aa, Artificial Sequence
  anti-C. albicans 2G12 variant CDRL3
QHYTPHFGAT

SEQ ID NO: 686 - protein, 10 aa, Artificial Sequence
  anti-C. albicans 2G12 variant CDRL3
QHYRAHSGAT

SEQ ID NO: 687 - protein, 215 aa, Artificial Sequence
  anti-C. albicans 2G12 light chain variant
AGVVMTQSPSTLSASVGDTITITCRASQSIETWLAWYQQKPGKAPKLLIYKASTLKTGVPSRFSGSGSGTEFTLTISGLQFDDFATYHCQHYKPFMATFGQGTRVEIKRTVAAPSVFIFPPSDEQLKSGTASVVCLLNNFYPREAKVQWKVDNALQSGNSQESVTEQDSKDSTYSLSSTLTLSKADYEKHKVYACEVTHQGLSSPVTKSFNRGEC

SEQ ID NO: 688 - protein, 215 aa, Artificial Sequence
  anti-C. albicans 2G12 light chain variant
AGVVMTQSPSTLSASVGDTITITCRASQSIETWLAWYQQKPGKAPKLLIYKASTLKTGVPSRFSGSGSGTEFTLTISGLQFDDFATYHCQHYQPFDATFGQGTRVEIKRTVAAPSVFIFPPSDEQLKSGTASVVCLLNNFYPREAKVQWKVDNALQSGNSQESVTEQDSKDSTYSLSSTLTLSKADYEKHKVYACEVTHQGLSSPVTKSFNRGEC

SEQ ID NO: 689 - protein, 215 aa, Artificial Sequence
  anti-C. albicans 2G12 light chain variant
AGVVMTQSPSTLSASVGDTITITCRASQSIETWLAWYQQKPGKAPKLLIYKASTLKTGVPSRFSGSGSGTEFTLTISGLQFDDFATYHCQHYREWHATFGQGTRVEIKRTVAAPSVFIFPPSDEQLKSGTASVVCLLNNFYPREAKVQWKVDNALQSGNSQESVTEQDSKDSTYSLSSTLTLSKADYEKHKVYACEVTHQGLSSPVTKSFNRGEC

SEQ ID NO: 690 - protein, 215 aa, Artificial Sequence
  anti-C. albicans 2G12 light chain variant
AGVVMTQSPSTLSASVGDTITITCRASQSIETWLAWYQQKPGKAPKLLIYKASTLKTGVPSRFSGSGSGTEFTLTISGLQFDDFATYHCQHYLSYNATFGQGTRVEIKRTVAAPSVFIFPPSDEQLKSGTASVVCLLNNFYPREAKVQWKVDNALQSGNSQESVTEQDSKDSTYSLSSTLTLSKADYEKHKVYACEVTHQGLSSPVTKSFNRGEC

SEQ ID NO: 691 - protein, 215 aa, Artificial Sequence
  anti-C. albicans 2G12 light chain variant
AGVVMTQSPSTLSASVGDTITITCRASQSIETWLAWYQQKPGKAPKLLIYKASTLKTGVPSRFSGSGSGTEFTLTISGLQFDDFATYHCQHYQPFKATFGQGTRVEIKRTVAAPSVFIFPPSDEQLKSGTASVVCLLNNFYPREAKVQWKVDNALQSGNSQESVTEQDSKDSTYSLSSTLTLSKADYEKHKVYACEVTHQGLSSPVTKSFNRGEC

SEQ ID NO: 692 - protein, 215 aa, Artificial Sequence
  anti-C. albicans 2G12 light chain variant
AGVVMTQSPSTLSASVGDTITITCRASQSIETWLAWYQQKPGKAPKLLIYKASTLKTGVPSRFSGSGSGTEFTLTISGLQFDDFATYHCQHYMAYDATFGQGTRVEIKRTVAAPSVFIFPPSDEQLKSGTASVVCLLNNFYPREAKVQWKVDNALQSGNSQESVTEQDSKDSTYSLSSTLTLSKADYEKHKVYACEVTHQGLSSPVTKSFNRGEC

SEQ ID NO: 693 - protein, 216 aa, Artificial Sequence
  anti-C. albicans 2G12 light chain variant
AGVVMTQSPSTLSASVGDTITITCRASQSIETWLAWYQQKPGKAPKLLIYKASTLKTGVPSRFSGSGSGTEFTLTISGLQFDDFATYHCQHYTAHNGATFGQGTRVEIKRTVAAPSVFIFPPSDEQLKSGTASVVCLLNNFYPREAKVQWKVDNALQSGNSQESVTEQDSKDSTYSLSSTLTLSKADYEKHKVYACEVTHQGLSSPVTKSFNRGEC

SEQ ID NO: 694 - protein, 216 aa, Artificial Sequence
  anti-C. albicans 2G12 light chain variant
AGVVMTQSPSTLSASVGDTITITCRASQSIETWLAWYQQKPGKAPKLLIYKASTLKTGVPSRFSGSGSGTEFTLTISGLQFDDFATYHCQHYTPHFGATFGQGTRVEIKRTVAAPSVFIFPPSDEQLKSGTASVVCLLNNFYPREAKVQWKVDNALQSGNSQESVTEQDSKDSTYSLSSTLTLSKADYEKHKVYACEVTHQGLSSPVTKSFNRGEC

SEQ ID NO: 695 - protein, 216 aa, Artificial Sequence
  anti-C. albicans 2G12 light chain variant
AGVVMTQSPSTLSASVGDTITITCRASQSIETWLAWYQQKPGKAPKLLIYKASTLKTGVPSRFSGSGSGTEFTLTISGLQFDDFATYHCQHYRAHSGATFGQGTRVEIKRTVAAPSVFIFPPSDEQLKSGTASVVCLLNNFYPREAKVQWKVDNALQSGNSQESVTEQDSKDSTYSLSSTLTLSKADYEKHKVYACEVTHQGLSSPVTKSFNRGEC

SEQ ID NO: 696 - protein, 214 aa, Artificial Sequence
  anti-C. albicans 2G12 light chain variant
DVVMTQSPSTLSASVGDTITITCRASQSIETWLAWYQQKPGKAPKLLIYKASTLKTGVPSRFSGSGSGTEFTLTISGLQFDDFATYHCQHYKPFMATFGQGTRVEIKRTVAAPSVFIFPPSDEQLKSGTASVVCLLNNFYPREAKVQWKVDNALQSGNSQESVTEQDSKDSTYSLSSTLTLSKADYEKHKVYACEVTHQGLSSPVTKSFNRGEC

SEQ ID NO: 697 - protein, 214 aa, Artificial Sequence
  anti-C. albicans 2G12 light chain variant
DVVMTQSPSTLSASVGDTITITCRASQSIETWLAWYQQKPGKAPKLLIYKASTLKTGVPSRFSGSGSGTEFTLTISGLQFDDFATYHCQHYQPFDATFGQGTRVEIKRTVAAPSVFIFPPSDEQLKSGTASVVCLLNNFYPREAKVQWKVDNALQSGNSQESVTEQDSKDSTYSLSSTLTLSKADYEKHKVYACEVTHQGLSSPVTKSFNRGEC

SEQ ID NO: 698 - protein, 214 aa, Artificial Sequence
  anti-C. albicans 2G12 light chain variant
DVVMTQSPSTLSASVGDTITITCRASQSIETWLAWYQQKPGKAPKLLIYKASTLKTGVPSRFSGSGSGTEFTLTISGLQFDDFATYHCQHYREWHATFGQGTRVEIKRTVAAPSVFIFPPSDEQLKSGTASVVCLLNNFYPREAKVQWKVDNALQSGNSQESVTEQDSKDSTYSLSSTLTLSKADYEKHKVYACEVTHQGLSSPVTKSFNRGEC

SEQ ID NO: 699 - protein, 214 aa, Artificial Sequence
  anti-C. albicans 2G12 light chain variant
DVVMTQSPSTLSASVGDTITITCRASQSIETWLAWYQQKPGKAPKLLIYKASTLKTGVPSRFSGSGSGTEFTLTISGLQFDDFATYHCQHYLSYNATFGQGTRVEIKRTVAAPSVFIFPPSDEQLKSGTASVVCLLNNFYPREAKVQWKVDNALQSGNSQESVTEQDSKDSTYSLSSTLTLSKADYEKHKVYACEVTHQGLSSPVTKSFNRGEC

SEQ ID NO: 700 - protein, 214 aa, Artificial Sequence
  anti-C. albicans 2G12 light chain variant
DVVMTQSPSTLSASVGDTITITCRASQSIETWLAWYQQKPGKAPKLLIYKASTLKTGVPSRFSGSGSGTEFTLTISGLQFDDFATYHCQHYQPFKATFGQGTRVEIKRTVAAPSVFIFPPSDEQLKSGTASVVCLLNNFYPREAKVQWKVDNALQSGNSQESVTEQDSKDSTYSLSSTLTLSKADYEKHKVYACEVTHQGLSSPVTKSFNRGEC

SEQ ID NO: 701 - protein, 214 aa, Artificial Sequence
  anti-C. albicans 2G12 light chain variant
DVVMTQSPSTLSASVGDTITITCRASQSIETWLAWYQQKPGKAPKLLIYKASTLKTGVPSRFSGSGSGTEFTLTISGLQFDDFATYHCQHYMAYDATFGQGTRVEIKRTVAAPSVFIFPPSDEQLKSGTASVVCLLNNFYPREAKVQWKVDNALQSGNSQESVTEQDSKDSTYSLSSTLTLSKADYEKHKVYACEVTHQGLSSPVTKSFNRGEC

SEQ ID NO: 702 - protein, 215 aa, Artificial Sequence
  anti-C. albicans 2G12 light chain variant
DVVMTQSPSTLSASVGDTITITCRASQSIETWLAWYQQKPGKAPKLLIYKASTLKTGVPSRFSGSGSGTEFTLTISGLQFDDFATYHCQHYTAHNGATFGQGTRVEIKRTVAAPSVFIFPPSDEQLKSGTASVVCLLNNFYPREAKVQWKVDNALQSGNSQESVTEQDSKDSTYSLSSTLTLSKADYEKHKVYACEVTHQGLSSPVTKSFNRGEC

SEQ ID NO: 703 - protein, 215 aa, Artificial Sequence
  anti-C. albicans 2G12 light chain variant
DVVMTQSPSTLSASVGDTITITCRASQSIETWLAWYQQKPGKAPKLLIYKASTLKTGVPSRFSGSGSGTEFTLTISGLQFDDFATYHCQHYTPHFGATFGQGTRVEIKRTVAAPSVFIFPPSDEQLKSGTASVVCLLNNFYPREAKVQWKVDNALQSGNSQESVTEQDSKDSTYSLSSTLTLSKADYEKHKVYACEVTHQGLSSPVTKSFNRGEC

SEQ ID NO: 704 - protein, 215 aa, Artificial Sequence
  anti-C. albicans 2G12 light chain variant
DVVMTQSPSTLSASVGDTITITCRASQSIETWLAWYQQKPGKAPKLLIYKASTLKTGVPSRFSGSGSGTEFTLTISGLQFDDFATYHCQHYRAHSGATFGQGTRVEIKRTVAAPSVFIFPPSDEQLKSGTASVVCLLNNFYPREAKVQWKVDNALQSGNSQESVTEQDSKDSTYSLSSTLTLSKADYEKHKVYACEVTHQGLSSPVTKSFNRGEC

SEQ ID NO: 705 - DNA, 645 bp, Artificial Sequence
  anti-C. albicans 2G12 light chain variant
gccggtgttgttatgacccagtctccgtctaccctgtctgcttctgttggtgacaccatcaccatcacctgccgtgcttctcagtctatcgaaacctggctggcttggtaccagcaaaaaccgggtaaagctccgaaactgctgatctacaaggcttctaccctgaaaaccggtgttccgtctcgtttctctggttctggttctggtaccgagttcaccctgaccatctctggtctgcagttcgacgacttcgctacctaccactgccagcactataagccgtttatggctaccttcggtcagggtacccgtgttgaaatcaaacgtaccgttgctgctccgtctgttttcatcttcccgccgtctgacgaacagctgaaatctggtaccgcttctgttgtttgcctgctgaacaacttctacccgcgtgaagctaaagttcagtggaaagttgacaacgctctgcagtctggtaactctcaggaatctgttaccgaacaggactctaaagactctacctactctctgtcttctaccctgaccctgtctaaagctgactacgaaaagcacaaagtttacgcttgcgaagttacccaccagggtctgtcttctccggttaccaaatctttcaaccgtggtgaatgc

SEQ ID NO: 706 - DNA, 645 bp, Artificial Sequence
  anti-C. albicans 2G12 light chain variant
gccggtgttgttatgacccagtctccgtctaccctgtctgcttctgttggtgacaccatcaccatcacctgccgtgcttctcagtctatcgaaacctggctggcttggtaccagcaaaaaccgggtaaagctccgaaactgctgatctacaaggcttctaccctgaaaaccggtgttccgtctcgtttctctggttctggttctggtaccgagttcaccctgaccatctctggtctgcagttcgacgacttcgctacctaccactgccagcactatcagccttttgatgctaccttcggtcagggtacccgtgttgaaatcaaacgtaccgttgctgctccgtctgttttcatcttcccgccgtctgacgaacagctgaaatctggtaccgcttctgttgtttgcctgctgaacaacttctacccgcgtgaagctaaagttcagtggaaagttgacaacgctctgcagtctggtaactctcaggaatctgttaccgaacaggactctaaagactctacctactctctgtcttctaccctgaccctgtctaaagctgactacgaaaagcacaaagtttacgcttgcgaagttacccaccagggtctgtcttctccggttaccaaatctttcaaccgtggtgaatgc

SEQ ID NO: 707 - DNA, 645 bp, Artificial Sequence
  anti-C. albicans 2G12 light chain variant
gccggtgttgttatgacccagtctccgtctaccctgtctgcttctgttggtgacaccatcaccatcacctgccgtgcttctcagtctatcgaaacctggctggcttggtaccagcaaaaaccgggtaaagctccgaaactgctgatctacaaggcttctaccctgaaaaccggtgttccgtctcgtttctctggttctggttctggtaccgagttcaccctgaccatctctggtctgcagttcgacgacttcgctacctaccactgccagcactatagggagtggcatgctaccttcggtcagggtacccgtgttgaaatcaaacgtaccgttgctgctccgtctgttttcatcttcccgccgtctgacgaacagctgaaatctggtaccgcttctgttgtttgcctgctgaacaacttctacccgcgtgaagctaaagttcagtggaaagttgacaacgctctgcagtctggtaactctcaggaatctgttaccgaacaggactctaaagactctacctactctctgtcttctaccctgaccctgtctaaagctgactacgaaaagcacaaagtttacgcttgcgaagttacccaccagggtctgtcttctccggttaccaaatctttcaaccgtggtgaatgc

SEQ ID NO: 708 - DNA, 645 bp, Artificial Sequence
  anti-C. albicans 2G12 light chain variant
gccggtgttgttatgacccagtctccgtctaccctgtctgcttctgttggtgacaccatcaccatcacctgccgtgcttctcagtctatcgaaacctggctggcttggtaccagcaaaaaccgggtaaagctccgaaactgctgatctacaaggcttctaccctgaaaaccggtgttccgtctcgtttctctggttctggttctggtaccgagttcaccctgaccatctctggtctgcagttcgacgacttcgctacctaccactgccagcactatttgtcgtataatgctaccttcggtcagggtacccgtgttgaaatcaaacgtaccgttgctgctccgtctgttttcatcttcccgccgtctgacgaacagctgaaatctggtaccgcttctgttgtttgcctgctgaacaacttctacccgcgtgaagctaaagttcagtggaaagttgacaacgctctgcagtctggtaactctcaggaatctgttaccgaacaggactctaaagactctacctactctctgtcttctaccctgaccctgtctaaagctgactacgaaaagcacaaagtttacgcttgcgaagttacccaccagggtctgtcttctccggttaccaaatctttcaaccgtggtgaatgc

SEQ ID NO: 709 - DNA, 645 bp, Artificial Sequence
  anti-C. albicans 2G12 light chain variant
gccggtgttgttatgacccagtctccgtctaccctgtctgcttctgttggtgacaccatcaccatcacctgccgtgcttctcagtctatcgaaacctggctggcttggtaccagcaaaaaccgggtaaagctccgaaactgctgatctacaaggcttctaccctgaaaaccggtgttccgtctcgtttctctggttctggttctggtaccgagttcaccctgaccatctctggtctgcagttcgacgacttcgctacctaccactgccagcactatcagccttttaaggctaccttcggtcagggtacccgtgttgaaatcaaacgtaccgttgctgctccgtctgttttcatcttcccgccgtctgacgaacagctgaaatctggtaccgcttctgttgtttgcctgctgaacaacttctacccgcgtgaagctaaagttcagtggaaagttgacaacgctctgcagtctggtaactctcaggaatctgttaccgaacaggactctaaagactctacctactctctgtcttctaccctgaccctgtctaaagctgactacgaaaagcacaaagtttacgcttgcgaagttacccaccagggtctgtcttctccggttaccaaatctttcaaccgtggtgaatgc

SEQ ID NO: 710 - DNA, 645 bp, Artificial Sequence
  anti-C. albicans 2G12 light chain variant
gccggtgttgttatgacccagtctccgtctaccctgtctgcttctgttggtgacaccatcaccatcacctgccgtgcttctcagtctatcgaaacctggctggcttggtaccagcaaaaaccgggtaaagctccgaaactgctgatctacaaggcttctaccctgaaaaccggtgttccgtctcgtttctctggttctggttctggtaccgagttcaccctgaccatctctggtctgcagttcgacgacttcgctacctaccactgccagcactatatggcttatgatgctaccttcggtcagggtacccgtgttgaaatcaaacgtaccgttgctgctccgtctgttttcatcttcccgccgtctgacgaacagctgaaatctggtaccgcttctgttgtttgcctgctgaacaacttctacccgcgtgaagctaaagttcagtggaaagttgacaacgctctgcagtctggtaactctcaggaatctgttaccgaacaggactctaaagactctacctactctctgtcttctaccctgaccctgtctaaagctgactacgaaaagcacaaagtttacgcttgcgaagttacccaccagggtctgtcttctccggttaccaaatctttcaaccgtggtgaatgc

SEQ ID NO: 711 - DNA, 648 bp, Artificial Sequence
  anti-C. albicans 2G12 light chain variant
gccggtgttgttatgacccagtctccgtctaccctgtctgcttctgttggtgacaccatcaccatcacctgccgtgcttctcagtctatcgaaacctggctggcttggtaccagcaaaaaccgggtaaagctccgaaactgctgatctacaaggcttctaccctgaaaaccggtgttccgtctcgtttctctggttctggttctggtaccgagttcaccctgaccatctctggtctgcagttcgacgacttcgctacctaccactgccagcactatacggctcataatggggctaccttcggtcagggtacccgtgttgaaatcaaacgtaccgttgctgctccgtctgttttcatcttcccgccgtctgacgaacagctgaaatctggtaccgcttctgttgtttgcctgctgaacaacttctacccgcgtgaagctaaagttcagtggaaagttgacaacgctctgcagtctggtaactctcaggaatctgttaccgaacaggactctaaagactctacctactctctgtcttctaccctgaccctgtctaaagctgactacgaaaagcacaaagtttacgcttgcgaagttacccaccagggtctgtcttctccggttaccaaatctttcaaccgtggtgaatgc

SEQ ID NO: 712 - DNA, 648 bp, Artificial Sequence
  anti-C. albicans 2G12 light chain variant
gccggtgttgttatgacccagtctccgtctaccctgtctgcttctgttggtgacaccatcaccatcacctgccgtgcttctcagtctatcgaaacctggctggcttggtaccagcaaaaaccgggtaaagctccgaaactgctgatctacaaggcttctaccctgaaaaccggtgttccgtctcgtttctctggttctggttctggtaccgagttcaccctgaccatctctggtctgcagttcgacgacttcgctacctaccactgccagcactatacgccgcattttggtgctaccttcggtcagggtacccgtgttgaaatcaaacgtaccgttgctgctccgtctgttttcatcttcccgccgtctgacgaacagctgaaatctggtaccgcttctgttgtttgcctgctgaacaacttctacccgcgtgaagctaaagttcagtggaaagttgacaacgctctgcagtctggtaactctcaggaatctgttaccgaacaggactctaaagactctacctactctctgtcttctaccctgaccctgtctaaagctgactacgaaaagcacaaagtttacgcttgcgaagttacccaccagggtctgtcttctccggttaccaaatctttcaaccgtggtgaatgc

SEQ ID NO: 713 - DNA, 648 bp, Artificial Sequence
  anti-C. albicans 2G12 light chain variant
gccggtgttgttatgacccagtctccgtctaccctgtctgcttctgttggtgacaccatcaccatcacctgccgtgcttctcagtctatcgaaacctggctggcttggtaccagcaaaaaccgggtaaagctccgaaactgctgatctacaaggcttctaccctgaaaaccggtgttccgtctcgtttctctggttctggttctggtaccgagttcaccctgaccatctctggtctgcagttcgacgacttcgctacctaccactgccagcactatcgggcgcattcgggggctaccttcggtcagggtacccgtgttgaaatcaaacgtaccgttgctgctccgtctgttttcatcttcccgccgtctgacgaacagctgaaatctggtaccgcttctgttgtttgcctgctgaacaacttctacccgcgtgaagctaaagttcagtggaaagttgacaacgctctgcagtctggtaactctcaggaatctgttaccgaacaggactctaaagactctacctactctctgtcttctaccctgaccctgtctaaagctgactacgaaaagcacaaagtttacgcttgcgaagttacccaccagggtctgtcttctccggttaccaaatctttcaaccgtggtgaatgc
